United States Patent Application Publication US 2026/0258423 A1 - sequence listing, part 27

SEQ ID NO: 167803 - DNA, 46709983 bp, Homo sapiens (residues 33,364,281-35,032,494 of 46,709,983)
  source 1..46709983: mol_type = genomic DNA
aaaagtacaaaaattagcggggcatggtggcacacacctataatcccaggtactcgggaggctgaggcaggagaatcactcgaacccgggaggcagaggttgcagtgagccgggagtgcaccactgcactccagcctgggcaacaaagtgagactctgtcgtgagtgtgcagttcatcacgtaggcttgtgttgatgtcaacataaggcaagtacttcctcattgctctacatcagtgaagaaatgtgaacaccaaggtttagactgagaagtagggcagggagattggatggaggtaaactttaaacatttcatgtcttaatttctgcttgtttacccccaagagaattttataaatccatttatttcttcatgttttaattaacatctaaaatatttcctgacacgtttaaatagttgcaaaagaaatactttacagtaagttgtaaatattcacattttaaaataaacttgctttatcgctcttataaatgcattcaatggaatctcctatcaaagcaatttgatacccatcattgtctactttgaaattacagaaactcggccagacatggcggctcactcctgtaatcccagcactttgggaggccgaggcgagaggattgtttgagtccaagagttcaaaaccatcctggacaacatagtgagacgaccttgtctctacaaaaaaatgaacagaattagccaggtgtggtggtgtgtgcctgcaattctagctacttgggaagctgaggtaggaggatctcttgagccctggaggtcaaggtatagtgagccaacattgtgccactgcactccagcctgggcaacagagcaagaccctgtctcagaaatatttttttaaaaatttttttaaaaagaaactccagaaactgttctttatgggttctgaaactttacaccatttcctttcctccttgaattcatattcttattcccacaaaagttcatcttcatgcagtagatttattgatcatctatcgtatatctttgcaacaaaaaagtatataaattgatatatttctttttatatgatcatagtctctgaatgttaaaaagaaaaaaatctggttgggtgcggtggctcatgcttgtaatcccagcactttgggaggccgaggtgggtggatcacgaggtcagtagttcaagaccagcctggccaaatggtgaaaccccgtctctactaaaaatacaaaaattagctgggcacggtggcaggagcctgtaatcccagctactcaggaggctgaggcagaagaatcacttgaaccctggtgacagaggttgcagtgagccaagatcaagccactgcactctagcctgggggacagagtgagactccatctcaaaaaaaaaaagaaagaaagaaaaatagcttttctggattattattgcaattattagtatacagttgatcaaatatttcataacctttgataaataatttttcagcataaaaagtccaatttcactggaaatgcatctcttttatttatttacttatttatttattttgagacagagtctcgctctgtcacccagggctggagtgcagtggtgctatctcagcttgctgcaacctctgcctcctgggttcatgcgattctcctgcctcagcctctcgagcaagtgggattacaagtgcatgccaccatgcctggctaattttttggatttttagtagagacagggtttcaccatattggccaggctggtcttgaactcctggcctcaagtgatctgcctgcctcagcctcccaaagtgctgggattacaggcatgatccaccacaccctgcctggaaatacatctcttaattaactggatggagcttcttccctcttccttcaatgcctgcaggtgtcacagatgaacatgccttcttgccacatggagacaggacctagtgcctctgctgctcctgttttccatgttttggggtgaggctttgtgatgggcttggaaggaatcccaaagtgtcacctccactcgagtctttggattctttctgatttataggtcaaaagctatttagtgaacatttatcaaaaattatctctatctagttgctgagcatgatatgaaaggaaaataaaaactcgggactccaattcactctgccaaaagaaaaaaactaagctgaaagctgagtcatgcaagaagctgcctttccttttgttcctaagcagagagctagaggtaaaggtaagtgtcttgggggggatatttaacctactctgtgttcaccttatcttctgtaaagtgctgattttctgagcatacaaggaatacataattgaaattgactattcccctacctgctccttttctcttgcaacttgtggattcgataatgtgaccataccctccttctttccataccagcctgttttttcccttatattgaagccctcaaaatcatctttggagaaaggcacagacctgtctcctgggcattgtccttaaccttggcaaagtaaacttctcaattgagacctgtctcagatacttttcagtttacaatcaacagcagctaacattgactgggcgtggtggctcactcctgtaatctcaacactttgggaggccgaggcaggtggatcgtttgagcccaggagtttgagaccagactgggcaacatggtaaaaaccctctctacaaaaaatacaaaaaagtagctgggcgtggtggtgcacacctgagtcccagctactcaggaggctgaggtaggagaatcacttgagcccaggaggtgcatgttgcaatgagccaagatcaagcaactgcattccagcctgagtgacagattgagaccctgtctcaaacaaaaagaaaaagaaaagaaaagaaaaaacccagcagctaacattataaaaacagaaactgccaaacattatacatctcctgatggacagatcaggagtagtcttgaaaaaacccattgttaggaatgataaattcctcttcaaagggtttaattgtgtaaagttcttgctctttgttcagaagcccaacctccttgtactctcatttctagcctgcaaacaactcttccgctctgattgtgccctgacatgcccagacatgttcagacatgccttgtactctaacagacaaactactcctaccccatccttctcttaactgcacgtttgccatatttagagaaagtttaagtcttatccagttgggttagtttagattgtgcggtccaactccaaccaatggggaaaggacacaggaacagaagctgcatgcggggtaaaaacccttctctcctttgttcggtgtgctcttgcaagcagatggacacaggcagcactcttctgcagaagtaaatgtgccttgctgagaaattttctgtctaagtgctggtttttctttgcagcactgagtgcttgtttctaacaccatcctgacctggccttagatcgaattgccaacttatagaaaatacaggggacaaagaaacaggttacatgatactgtacagatgcaaattccagactatgagcaagtctgtatgacaaaagggctggtttcattaacaaatcaattgcaaggaaaaagagggagagcttatctcttttcttttcttttcttttcttttcttttcttttcttttttcttttcttttctcttcttttcttttttgagacagagtttcgctctgtcgcccaggctggagtgcagtggcacaatctcagctcactgcaatctctgcctcctggattcaagcgattctcctgcctcagcctcccaagtagctgggattacaggcacccaccaccatgcccagctaatttttgtattttagtagagacggggtttcaccatgttggccaggctggtcttgaactcctgacctcaggtgattctcccacttcagcctcccaaagcgtttggattacaggcatgagccaccacacccagccaagcttatctgttttcaattgtgtgtgtgtgtgtgtgtgcacatgagagagaaagaggaagttacatttatgagactgatagtggcaagaggcaggcaaatgcctaggcagataacagcgggtccctggtgaaaccccactgccaagccaaaaacagtttaaagcctgaaagtcaagctacaggtcacatccacggactggattgagaacctgtcttcccatttggtgcactttcctctgattgagccccacccttcacctgttttatatatacctcctaattggttctctacactgtcatgcccacctttcagtggtgtctttgctttagccttttttgcatactcacaaaccaatcagcatgcactcccctattctgagcccataaagaccccaaactcagccacactgggagagagaaaccacctgactgtggggatcagggaccacccccacgtccactctccactgagagctgttctgctcaacaaaattcttctctgcccatcctccgccttcgaattgtcagcatatcctcattcttctcattcttcttggacaagagcttgggaactgggtacaagccataatgcaggtggggctgagtggtcaggatgtctccagcagcaggcctggggctgagcaaagcccaggtgaggttgggagtgggggtgtgtgtccccagccatggaggtccctgcttggcaaagtggtagagaaaaatcctgtgtcaagacaattaaaacttttaacaccaacaattttttttttttttttttggatacggagtcttgctctgttgcccaggctggagtgcaatggtgcaatttcagctcactgcaaacttcacctcccgggctcaaaggattctcctgcctcagcctccagagtagctgggactacaggtgcacaccaccacacctgtctaattttgtatttttagtagagacagagttttgtcatgttggccaggctggtcttgaactcctgacctcaggtgatccacccacctcagcctcccagagtgctgggattacaggcatgagccaccatgcccagctaaattttttttgttttcatttgtcacatagatgagggcttcctatgttgcccaggctggtctcgaacacctgacctcacctcattatgtgattatgtgccaggacaataggcctgagccactgcacctcccacaatttttgtaatatgaattactaacttattttgtgccagctaataatattatggtatcttgtgctttaaataagatgcgtctgaaatgtttatagatgaagtaagataatatttgaaatttacttcaaatgaacactggaggaaaggtacagaaatgcagggcagtgcaatgggtgtaatgcactgtgcacaagggaaggccttattcccccacctgctgaagcattgccaagagacagcctggctctgtcagtatcttcaagaagcacctcactgaggagtaccagcctgtgctgagcccttgtctgtgacagcccacatccagtgtcttctccatcagggcttgccccactgggtcagctcccaggtccatcccctagaactcactcttcccagccctgcttccttctctcccttgcacagatttgatcctgggagcactccctattcaacttcctgcaagctaacctggatctcagagcctgcttccagggaactcatcctgtacaagttgaaacaaaactagccgtgaatggataattcttaaagctgagtgtgataggtagaattcaaagatggtccccaaggtccctacctctgatataaacaccctgtatcatccccagtactgtctggcaatagattttactcctgtaactagcttctttggcacagttgaccgctagccggggagaggagtattctggtgggcctgacctaaatcacatgagccctccaaaagcagagttttctctggctcctcccagacagcaattcaaagcacagggattcaacaggctgctgatggctttaaggtggagggagccacagtgcatgggatgcaagtggctggtagcagctggggcagccactgtgggcagtcagcatggaaacagggtcctaggtcctgcagccgcaaggaatggaattctgccaacaggagcagacttcaagaattctcccccacagagccttcagatgagaacacagcccagccgacaccttgacttcaaccttacaatatgctgagcagagagcctagccatgctggacttctgaccacagggtgtgagctaatccatgaatattgttctaagctgctaagtgtgtaggaatttgttgcacagcaacagaaacctaatatactaggtgacaggcacagagaggttcataaccctagtctatttctgtacaagtctgaaactttccatagtgaagaaaaccaaaatatttcaccccaaaatatatttccttgacatagttcaagatggtgattcagaagggctagaaatacaagagcaactaaaacgctgtcttttgtcagggagatttgcatctgtcgagaaaatctgcacggatgcaaccaggcttcctctcaggccctcccttgtcctatccaggaaagattaactgagagtcagacatctttaaaggtccgaaaagcattcatcacctattctctctgagcactgctatctgtaaactttctaacaagaccacctttgctaaccagacctcatcttctccccctcccatacctgttttgccatgattcaagtccccattctgtctgtacactcaggaaggcatggaagctactgagccccactggggagttggggtcatcactctggggttctcctgtgtgcacgttaatacatttgaatgccttttatccttttaatctgccctttttttttttttctgagatggagtctcactctgttgcccaggctggagtgcagtggcatgatctcggctcactgcagcttccacttcccaggttcaagtgatttcaagtgattctcatgcctcagcctcccaaatagctgggattataggcacgccccaccacacctgtctagtttttctatttttagtagagacagggtttcgccacgttggtcaggctggtctcaaattcctgggttcaagcgatccacccatctcagcctcccaaagtgctgggattataggtgtgagccaccaggcccagcctttatcagccttttgtccactgatttttcagcaaaacctcagagggtgaagaggaagttttcccttcgtcaccataacagtcatcataaatgtttaaaatcctgattttcatgttgctaatcgaagctgagtgttgggaactcagctgagtggctcattatacttctctctaatttcaggaacatataaaatttcccataataaaaccttcaaaaatttgtacaatgattgattggtcagcaggcaatttgagtagttcctacttacattatttttgtaagcaaatattaataagtgccagccttcttaaagggcttgtcacccagtcactggaatcattctgtttctcaactgagttgtctcttagcttgtgccccagagattttcacacccaggtcatcctagtgagagtccaagggtgggagagaggagcatgcttttctttatgaagtaaaggaagggtgattgtggaagggaaggtggaaaagaacctcaaaacgtgggccctgaagatgaattgtaggcaaaagcacttatggaagctgagagattgcaaattaattgcattaaagcagtggtggcagttttacccccagaggaatttcgcattgtctggagacattttcggttgtcacaactggagggtgggggtaggtgctactggcatctagtgggtacatgcacagaacagtccctttttccccacccaagtatcatctggcccaaaacgtcaacagtgaccaggtggagagactatgccttagacacatctgtgtccacacttctggaaaatcaccagaaacccctaaaattgtgcatactcttttttttttttttttttttttgagatggagtctcactctgttgcccaggctggagtgcagtggcgcaatctcggctcactgcaagctcctcttcccgggttcacgccattctcctgcgtcagcctcccaagtagctgggaccacaggcgctcaccaccacgcccaactaatttttttttgtatttttttcatagagacggggtttcaccatgttagccaggatggtctcgatctcctgacctcgtgatccacccatctcagcctcccaaagtgctgggattacaggcgtgagccaccgcgcctggccaaagtgtgcatacacttgactttgttactttgagagacgtatttcaatttttctgctactaaaagtgattgcttctacttgggaaggtatgagcatgggatgtagcatttgtcactgcagagaggccagcagcccccaggtctgtagcaagacacccatgccctcacttaatgctgaaggagaccattggactggctccagagggcaccgcccaggtgcgcgggtgcggtaggattgtttttggggaaccctggggccaggcctcaccttgtgggtggagtagagaggttgctcctaaaagaaatgagaatgggcctgtaatcccagcactttgggaggccgagacgggcggatcacgaggtcaggagatcgagaccatcttggctaacacggtgaaaccccgtttctactaaaaatacaaaaaattacccgggcatggtggtgggcgcctgtagtcccagctacttgggaggctgaggcaggagaatggcatgaacctgggaggcggagcttgcagtgagccgagatcgcgccactgcactccaacctgggaggcacagcgagactccgtctcaaaaaaaaaaaaaagaaatgagaatgggcgggcgccgtggctcacgcctgtaatcccagcactttgggaggctgaggcgggcagatcatgaggtcaagagatcaagaccagcctggccaacatggtgaaaccccgtctctactaaaaatacaaaaattagctgggcgcggtggtgcgcacctgtagttccagctactcgggagcctgaggcaggagaattgcttgaatctgagaggcggaggctgcagtgagccgagatcgcgccactgcactccagcctgctaatagagtgagactccgaaaaaaaaaaaaaacaacgagagtgagcctcagccctcctgggaagcaaatgaaatgaacttcaggccaggaaatgaagacttgaaggaatccataatccctgattcagggaggcacctctccctccctctgatctcaaggtgcgtgggcatctaccagggtgagagatttgcctgagggcactgtgattctgaagaggttggcctggctccttagcagacaggaggcccttcaaggccctgagttcattcctgtgggttccaagcatggccccagcatggcagcattaacaagtgactgcctgggtaggaattcccttcctttacccataaaccttcagggaagtcacattaaagctgtaatcttgtcaccactatctctttggaaaatgaagggagggatttatgcccagagttggctgaaccagtagagagacaagcaaaaggcaggaggtgccagtgtggtgagcagaccccttggggaatagtaagcaggctctgctaccagatgaccagtttcttcgaaactgggagaattcatctgaaatgattatttatgaagttcaagtatatattcaccctgagcaagaagagtttatttgatttcattaaaatcataactgcatggaaaacaagttggtaaaataaagcatttgtgttgcacgtgttttcctctaaaattaaactgggattatacccaaaagctgccttctgtaaccagctctgtaccagtttggctggtatctacttcctgaaactcacatctttatgacaataatcatcaagaataaatacatgaagcaaagctgggtcttcctagttctgttgctgcttgtcacttcagggaaaggaagttgaaagaaagaagaccgagtatatttgttcatcctacaaactgtgtgagtgtattgtatgccctataaggtgcacatctactcattgccaggttcaaggatctttgacttggacaaagtagaaatttgggatgtatactgcttttgggactttccttcaactgtaaacaattattatggagaagcatacatttctctgattctttgttggcctttcagcctcttgacccacttcctcaaatgtatagtggtttttatattaaattttccccttgactaagcaaagcatgtagtgtccagttacacttcctcttcaatagggaaatgcttattttttctatttgtagaacttaaaagcaaacagttgcaatatgaaaaaaattacttagttcacccccctagagtgtggaaatggatgattcagaattattatcaagtatttcttttggaggttgtacaaagttcagattcgcaattaggcacaaaacaatgtcttgaagggatagggactccagggtacagtaacccaatttgaattccagccctgccacctactggccgtgtgactttgggcaaataactttaggtctctgtacctaaaaccccaagaagtgcttggtaagtattatataataattatagtaataaacataaacttggcatgctcatgctcacatcggtatcacagggacattgtaaagagaaatgatgagcatgcagcttctagcgcagttcatagttgcagtattatctagatgattctagggtcatgtgcttcagtcactttttttttttttcaatagaggcaaggtcttgctatgttgcccagattggtcttgaactcctgggctcaagtgatcctcctgtctcagcttcccaaagtgctgggattacaggcatgagccactgcactcaaccaagacacattttccttcacacacacacacaagtcctccattataaaatgggaggtgctgatgctgattttaaaccaaatcaaaccgtcccactcttcagtcttttcccatcaacataagtagccactccttccttccagtcgctaaggtcaaaaaccttatgccacccctgactcctgcctttctcatgacccgcattctatctgtcaggaaatcgcacccatgctaccaaaatacctccactctgaccacttttaccacttccactgctactaccctggtccaagccaccattcagaaaattaggacacatctaaaaagcatcttcacagaaacatctagaataatgtctgaccgaatgcctgggtagcataacctagtgaaattgacacataacattaactatcacatgatgttaaataaatgatcaaatagttgatccattaaaataagagttcaaatggcttagtttaagctagtgtcattgaaagaaaaaaacacaccatttaaaaaatatgttcaggctgggcaagatggctcacgcctgtaattccaacactttgggaggctgaggtgggtggatcacctgagatcaggagttcaaaaccagcctggccaacatggcgaaaccccatctcttctaaaaatacaaaaattagggagggtgaggcagcagaatcgcttaaacccaggagacagaggttgcagtgagctgagatcgtgccactgcactccagtctgggaaacagagcaagactccatctcaaaaaaaaaaaaaaaaaaagttcaaatttcagggtttttaaaatagacatatttttttctctaatgctaatttcatttaaggtgttttcaaaaagttaaacaaaaatttttctaaaactagattgtggtagtatttatataactctgaagttaataagaattattgatgtatacatttaagatggatgagtttgtggcatgtaaattatacctagataaggctgtttttttaattgggcaataaatgagctgttgattatgtaaaaacattctatttcaggaagaatatttaaacagaaaattccggggctgagacacaactacacttgatagtatgcaattataagtaggataaaatcgggagacacttgaaaattagtattacagacaaaatcctgagtagacacaagaaaataatatttttaaaataatcttttaaaaataatttttggccgactgcggtggctcatgcctgtaatcccaactctttgggaggccgaggcgggtggatcatctgaggtcaggaattcaagaccagcctgtcgaacatggtgaaataccagctctcctaaaattacaaaaattatccaggcatggtggcgggtacctgtaatcccagctacttgggaggctgaggcatgagaatggcttgaacctagaaggcagaggatgcagtgaaccaagactgcgccactgcactccagcctgggtgacagagtgagaccctgtctcaaataataataataataataataataataattaataatgatctttttaaaaggtaataagtttttttcttataaatttgaatgacactgaaaatatcaactgcttttggaaggaaagagctaaaatgcaccctttggatttagccacaaagaagccactggtgccgtgacagtgacactctcccttcgtgttcagcgacatcagcactgggcttccggaggcacctggaggagggagcttccttcccaccttgtcttcctccagcgccactcatcccatgtaggggacaaacaaaaccttccagaggtgggcaccgctcacctctcggtccctcattttctcccagcaatcacactgtgctcaacctgcccttttccttatttactctcctttctatctagcacagccaccttctctactttctccaatttgccagtttttctgggatttttttttccatgctcttaaaaatttcccatcctcatggcagtgaccacagtcaccgcagcattttgacaggtatgaaatgagactcatagttagccactgtgtgctcacctgctctgaatatggtgccctgaaagtccctggactgtgagaattgacagacacagatgaccagtcacctcttgactcacatgaggtccagaaacccatctgtacagctcccttcttgcaagggatcttaactggaggaagagaaaactcagccccttttgacgaatgtctcatgaatgcagatgctggctggcgatagaaagggtggcagaatttgtagactgtaagaacattctccacctaattaccccttggcccaacctctatcattcacttgcttctccagtgcccaggagcgatgggactaagcaggcagtgctgaaagaactgtggggactctgtctgaaagacctggcaaaagagccggagcagtcagcagcagtgtcagcagcacagagaaggcatagccaacagcaacatagcagagaaggcagggcacagccaacagtagggctgcttgcagcaggtgcatttctgaggatatgtgtgagccctgctttgctgcctaggcttcccatctgctcttctctccccacccaggagccctttgaagaaatggcggaagagaaggagcctttcaaaagccaaagcctggacttccagcaacatagctaagggacaactggattgttgagatttgagattctctataaaggcgatacagtatacacacacgctgtgtggagcctgggacattccagagatgttggtatatggcaaagcaatttatttgcatacatttgacatgtatccagtcactttcccaagctcatggatactggcaaagctgtcttgtttatttgtttgttttgagacaaagtcgtgctctgttgcccaggctggagtgcagtagcaccatcctggctcactgcaacctgtgcctcccagattcaagcgatttagagcctcagcctcctgagtagctgtaattacaggtgcgccaccacacccggctagtttgtgtacttttagtaaagacggggttccgccatattggccaggctggtcttgaactcctggcctcaggtgaccctcccacctcggcctcccaaagtgctgcgattacaggcatgagccaccatgcccggccatggcaaagcttttaattgcatctaagtgttttagaacagtagttctcaaagtatccagaactcctttcagaggggatgcaaggtcaaaactgttttcataaccaaccaagagatgaattgtctttttcactatcattctttcagtgggatatgcaatgggattttctagcggctgcatatgtgatattgcacccgtgcagagcagagcagatgtaaaaacccagcttccttctattaggacagaaactaaagagatgttttaaaatctctttttaaagaatagcaattttggccgggcgcggttgctcacgcctgtattcccagcactttgggaggccgaggcgggcagatcacttaaggtcaggagtttgtgaccagcctgaccaacatggtgaaaccctatctctactaaaaatacaaaaagttagccgggcatggtggcatatgcttgtaatcccagctacttgggaggctgaggcaggagaatcgcttgaacccaggaggcagaggttgtactgagccaagatcgcaccgctgcactccagcctgggcgacaagaacgaaactctgtctcaaaatacataaatcaaaattaaatggcaaaactctggagaatgctggaggaatgtgtgacctccaaattaagcagagcatctgtgagctggatgtcccgtacccgttaaaagtcactccccgtctcccctcctgccagcccctggcatccattaatgtactttctgtctctatgaatacgcccattttggaaattttacataaagaggatcatacaatacatgacctttgtgactggcttctttcactcagcatcacatttttgaggttggtccatgtcgaagcgtgtatcagtgcttcttttctttattgccaaataatttccaccatttggatatgtcgcgtgctttgtatctagttataagttgatggacatttggcttgttgccacttttgggggcgattatgagcagtgttttaggggcccactttctttttctttcttttttttgagcaattttatcaaagaatacttttttgttttggaaaatatatttttcatgaaaaatatgtggtttctgttaacatgtaattgatatgttactttttttttttttttttgagatggagtctcacgctgtcgcccaggctagagtgcaaatggcgtgatctcggctcactgcaacctctgcctcctgggttcaagcaattatcctgcctcccgggttcaagtgattctcctacctcagcctcccgagtaggtgggattacaggcaggcacgaccacacccaactaattgtttgtatttttagtagaaacggggtttcaccacgttggccaggctggtgtcaaactcctgacctcgggtgatccacctgcctcggctcaggacaaaccacccaaaatatggccataggagatcagaacatgccaaaatatacttccttggcatattttgagctggttattttgagaaactacaggcacaggaacagctgaaaagctgtccttttgtaaagaaaatttatatctacaaaggaaatctacatcggtaaattgtatcaggcagaaggcctgggatatctctatttttttttaatacctctattagctcagagactgtttctctgcagagcaggacagggattgctcaccaagcacttacttccctttccctgccatgacttgctgttgcttaatccccggaagcctcaagcctctactcctttctgtagagcagaatgctgtataaggcctgacatggtggtcacacctgtaatcccagcactttgtggggcagaggcagctggatcacttgaggtcaggagtttgagaccagcctggcaaatatggtgaaaccctgtctctactaaaaatacaaaaaacaattagccaggtgtagtggcacatgcctgtaatcccagctactcaggaggctgagacaggagaatcacttgaacctgggagtcacgggttgcagtgaggagccgagatcacaccaccacactccaccctgggtgacagagcaagattctgaaacaaaacaaaacaaaaaacccaaacagaatactgtataaacctcaatcatctggactttttgagcctcagatttggtgggacttccatgcgtatacacataattaaaatggttttagtggagagactgtcatctgtccactgtcagtttacttcatagactcaattatcaaaccttcagagagtagaaagttttactctccaccacactagtctttaaacatgcgtggtgtctctaacatgcagccgagctgagaacactggctgggctatcttcaggcctcccacgccctccgctgtgactcgctctgactcacacaacaggatggcagaggcttggcaagacaggaagccaacgcctggggcagcagccaggtctgtgctcccggaaatccacatttggtcaaaggggacacttcggggttggtcctccctctggctgggttggcccgatttcttcctgccttgcccccatgcttcagagactcctccacacagagctggtcttaaagcataaacaaaacccatggatgatggggccacagagattaaatggcaagaccccggaggatgctggaggaatgtgtgacctctaattatgcagagcatctgtgagctggatgtcccgtacccgttaaaagtcactcctcgtctcccctcctgccagcccctggcatccattaatgtactttctgtctctatgaatgcacccattttggaaattttacataaagaggatcatacaatacatgacctttatgactggcttttttcactcagcatcacatttttgaggttggtccatgtcgaagcgtgtatcagtgcttcttttctttattgccaaataatttccaccatttggatacatcgtatgctatgtatctagttataagttgatggacatttggcttgttgacacttttgggggcgattatgagcagtgttttaggggcccactttctttttcttttgtctttttttttaacatggtctcactctgtcgcccaggctggagtgcagtggcacaatcacagctcactgcagcctcaccctcctgggctcaagcaatcctcccactttagcctcctgagtagctgggactacaggcatgagccaccacatccagctaatttttttttcttttttttttttgtaaagatgggggtttccacattgcccaggctggtctcaaactcctgggctcaagtgatccactgccctcgacctcccaaactgctgggtgctgggattacaggcgtgagccaccactcccagtctaggggcccactttcgaatcacaagcagccactttctggaaggcacctcatcacgcattggcagggctatgtccctcacaggttgccccagatgacggtcttcccaagtgacttctgctccaggtccactgttcaggctccccttggtcctacccctccagacatccagccttggggggatcctgggcccctactgttctttcctatatcagcctcagccaagctctcctcacccctcaatccatcagatgtcctccagtgacattgaacttcaaagaaagagcagaggccaggtgtggtggctcatgtctgtaatcccagcactttgggaggctgaggtgagtggatcacctgaggtcaggagttcaagaccagcctgcccaacatggtgaaactctgtctctactaaaaatacaaaaaaattagccgagcatggtggcgggcacctgtaatcccagctactcgggaggctgaggcaggagaattgcttgaacctgggaggtggaggttgcagtgagccgagattgtgctactacactcctgcctgggcggcagagaccctgtctcaaaaaaaaaaaagaaagaaagaaaagaagaaagggagggaggaaggaaggaaggaaggaaggaaaaagaaaagtaaagaacagaaaaagaagaaaggaaaagaaaagaaaggaaaagaaaagaagggaagaaggaaagagcagagaggcccagtcgctcttctcagagtctccgtggcatctcggtagatttgctgatccctttacataacccaagttgaggcatgccctaatttcacccacaaatgctactaagcccaggcccttatccagccaaaaccatcctgccaagctcccaccaccaccatcagcatcattttcaggttgttggtcatcactggttgttggtcatcactggttgttggtcatctatgtcacctaacaggccactcatgacgttagcccttgacttcaaaaaggacctcaaagaaaattccagttttcactccaaaaggagaaatcaggccgagctgtgatggctcatgcctgtattcccagcactatgggaggctgaggcaggcggatcgcttgagcccaggagtttgagaccaccctgggcaaacctatctttccaaaaaaatacaaaaagattagctgggcatggtggtgcgtgcctgtagtctcagctagtcaggaggctgaggtgggaggatcacttaagcctggaaggttgaggctgcagtgagcggtgatggtgccactgcactccagcctggataacagagcaagatgctgtctcaaaaactagcaaacgaaacaaaaggagaaactgctggcagcccctaatctagtactgtcccggctccacccaccttcagatccagcctcctcccctggcacacgggagccccctcctctgactgtgctgaaagtgagggaagatcccctctggggagagagctgtagccttgacctctgcacaccttacttatccagagcacgaggcagggccgctgactcatcctggtttaccctgggctttcccagtttcagcactgaaagtcccgcatctggaaaagcccctgagtcgctgacaaaccagacagtccggaccatgcaaagcacagtgcatggtgctttagccacaaagttgattgaaaagtcagaggcagtgagccacaggaagcgccacgtgacccagactgcgaggaggacacaggaaaccaaccctcactgtgtcctgctagggggttaacccgtctacaagcatcagggttgccatttcagagatcagcaaactgaacagcagtcgtgacttgtcctcgcctgcaagacaagcgagtaacaaatccatgaagggaaggacacggaattgagcaagggggcagggccggatgtcattttggcgtttttttttctttcagtgattgaggtaaaattcacataacataaattaaccattttaaagtgtacgattcagaggcatttggtacattcacactgttgtgcaagcaccacctgtatctcgttccaaaatattttcacttccccaaaaggaaactgtgtccccatcaagcagccacaccctactccctcacccccgcccccagcctctgacaaccaccaatgtaccttttgtctctatggatttgcctttactgaacaattcatagtaatggaaccatacaatatgtagtcctttgcgactggctttttttactcagcatcaatttttttttctttttcttcgagacagagtcttgctctgtcaccccggctggagtgcagtggcatgatctcggctcactgcaacctccacctcctgggctcaagcgattcacatgcttcagccttctgagtagctgggactgcaggtgtgcaccaccatgcatggctaaattttttttttttttttttttttttttttttttttttttttagagagggaggtcttactacattgcccagactggtctcaaactcctggcctcaagcaatcctccttcctcggcttctcaaagtgctgggattacaggcttgagccatcacgcccagcctatcatcctagttttgttttttgggttttttgtttgttggttggtttgtttgtttgtttttgagacctagtttcactcttgtcacccaggctggagtgcaatggtgcaatcttggctcactgcaacctccgcctcctgggttcaagtgattctcctgcctcagcctctcaagtagttgtgactacaagcatgcgccaccacacctggctaatttttgtatttttagtagagacagggtttcaccatattgtccagcctgatctcaaacccctgatctcaagtgatcctcccactttggcctcccaaagtgctgggatttcaagtgtgagccaccgtgcccggctgcctcatcaattctctataaacagttattaatgagaagtcagttgagctgtttctatgtatttgtttccagaaagaaacagggtgcacctagaccaccctggacctcagtaaaaggctctcttccctttaaataactgatcgagaacttctaattattcttctatgaaccttagaatgtaccaagaaaatccattccacagagtcttatttctgggcatcctgtgcatatgagctgagaggaatctgtgatttttatgcagcgctgaatgtcatcaaaaggcttcgaggaagagtttcctgagtttccttgatgttcgcggcgcttactgttactttcacacttagctaagtaacctttgatactgtgtggttataacataataaccacaggtcctttgtcttctctgtcaagagtgaagaattcgaaggactttaaccactggtaaaagtgtcttctcacataaaccgcatagcagcaagcattacgtgaaccagctggttattctcactaaatgggttagatacaagttacaagccgatcgcgaagctgcctagactggattgagtgtaggttagccaaacggcatgattgagaagataaatctcatctgtccacccttttcccgttagttccaagccagcctcgtggctgagcccagcttcccaagcctctctgaagatggcgtcaggcagtccaagcccggtttagctaagagtgcttccagccatcccaggctgcaatcacgccttcctttgccatctgggctctccccaggttagtggaactgctttctggaaggtgagtcctgccctgtggagtgcctggagtagggactggtcaccagcattaagtgcccagggagggagcacgtatacacgaatcaatttttagaagagacaataacccactcaaaaaagggcaacagccagactggtagctcatgcctgtaattccagcatttgggaggctgaggcgggaggatggcttgagcccaggagtttaagaccggccagggtaacttagtgagaccctcgtctctctctatatatatttttaattagctgggcatggtgacccctacctgtagtctcagctacttgggagcctgaggtgggaggatggcttgaccctaggaagttgaggttgcagtgagctatgatcatgctgctgcaccccaaactgggcaacagaacaagacaaaaaaaaatggagtgggggagaaaagatgtgataatagaaaaagagattcaagtgttgttaaacaatgggtggccagccgggcacagtggctcacgcctataatcccagcactttgggaggccgaggcaggcagatcacctgaggtcagcagttcgagaccagcctcaacatggagaaaccccatctctactaaaaaaaaaaaaatacaaaattagccgggcgtggtggtgcatgcccgtaatcccagctactcagaaggctgaggcaggagaattgcttgaacctgggaggcggaggttgcggtgagccgagattgcaccattgcgctccagcgtgaaactctgtctcaaacaacaatggatggccaacctcatccacggtcaaaaaatccaaatcaaacaacaatgagatatcctgggggtggggggcagtttcatggacaaatattaccccgtttaatatccttggtaccagtgaggttgtggggaaagaatgtgctcactagcggcccctgaaggagaactgagcacctttcctggccttggggcctccaaaccggcttcctggatcttccaaggattctgctaccagtgaccttccattaatttgttttctgcttaaactagctagggtgggttctgttgtttccaatttggcctctaacagaaggcctctgagcttcagttttcctcccaggtgagaaggggatactgctctcttctttacaagtgggttgagagcgtttcccgaaataacatctcaagtacagctgttcactagatgggtgtgttatcagcccctgtccacaaccccttatctgggaacctcaggggccagaaatgtttcatgatttgggttttttggtttgtttttaagatgggaggggggatctcactatattgcccaggctggtctcaaactcctggcctcaataaatcctccctcccaccttggcctcccaaagtgctgggattacaggcgtgagcacctagcctaatttggcgttttagaaaagcgatatggtgcaggtaatattaggtagcactctcagcatgttgtgggcagcaccctgtaatcaaaccatttctaattttctagggaaagtgtatccatttcacatttaatggaagaattaaggactatatctagtttgatattaattcaagtcaggagttaagaaaatgtttgtgattttcagagctcttcggattttggagctgtgagttggaatttattttcccataacctaaatattttattctgtgatacttgatttttttgttttgttttgttttgctttgtttttgagatggagtctcactctgctatccaggctggagtgcagtggtgtgatcttggctcactgcaagctgagcctcctgggttcaaccgattttagagcctcagcctcccaagtagctgggattacaggtagtagccaccgtggctggctactttttgtatttttagtagagacagggtttcaccatgttggccaggctggtttcaaactcctgacctcaagtgatcccacctcggcctcccaaaatgttgggattacaggtgtgagccaccatgcccagcctgatacttggttttttaaaaatccttcgacacaggactggagtatgacatctgcagctctcgtgggaagagctctggccccttggcttattcttgcttcttagcagtcccagtgaccttcagcctgaggcaggtgagccccaggtagtttatgacatcgctgggttgttggcctctccaagcccaaagtgacactagcatttctctaggccttgaactacctggggagtcagagccaccagcattgaatgggcatcagtttgtttttgtttttgtttttgttttgagacggcgtctcactctgttgcccaggctggagtgcagtggcgcgatctcagctcactgcaagctccgcctaccgggttcacgccattctcctgcctcagcctcccgagtagctgggactacaggcgcctgccaccacgcccggctaattttttgtatttttcgtagagacggggtttcaccgtgttagccaggctggtctccatctcctgacctcttgatacgcccgcctcggcctccgaaagtgctgggattacaggcgtgagccaccgcggctagccgaatgggcatcagttttacatatgggtcctgaactgatttccgtgggaggaaatcccagaattcccaattcagattaagggtaggacatccctaggttaaaattctcttattaaggttctctaagaagtcagatttgagcatacagatggactactactgcagcaatcactgactgagcattttacaaccctatttttaaggtgcctatgtagtttttccctcttgtcacagcttaattgaggtataactggtatctattatgccgtgcatgttttaaatatacattttgataagtttttaacatacgtgaaatcatccccacaatcaaaatcataaatatccattacccccaaaatgtcctcgttgtacacagttttgaaataaatgttgttgggattataagaggaagtaggctgggcacagtggctcatgcctataataggaagtgcatcatgttttcagtaatcaaatctgcctaatgatccatctagcttcctatttatgcaacacatcttacttgtagataattaccaaattcttgaaggccaggctgggcggctcacatttgtagttctagctacctggaagactaaggtgggaggattgcttgagctcaggagtttgaggccagcttgggcaacaaagcaagaccccggttttaatttttaaaagaaagaaagaatggaaggaaggaagaaaagtcctacagtaggttgaagttgaagtgtggcgacaacactttggtcaccgatgtatctcaagtgtctagaacaatgcctggcatctaagaagtgcttagtaaatattttttgaggaataaaaaagtaaatgagtttgtctctctctctctttttttggcggaggagtgggcagggtctcactctatcacccaggctggaatgtggtgatgcaatcatggctcactgcagcctcgaactcctgggcctgggcgattctcctgcctcagcctcccaagtagctgggactacaggtgcacaccaccaagctcggttaatttttttttttttttttttttttgagatggagtttcactcttgttgcccaggctggggtacaatggagcgatcccagctcatggcaacctctgccctctgggttcaagcaattctcctgcctcagcctcctgagtagcttggattacaggcatgcaccaccacgcctggctaattttgtatttttagtagagatggggtttcttcatgttggtcaggctggtctcaaattcctgacctcaggtgatccgctcgccttggcctcccaaagcgctgggattacaggcgtgagccaccgtgcctggcctctaattttttctttttttttttttgagacatggggctttgccacattatccatgctggtcttgaactcctgggctcaagcaatcctcccgcctcggcctcccaaagtgcttggattacaggtgtgagccaccgcacctggctgaatctctttttgatacttggataagtccaagcttcagcattagaatatcatatctggtagtgttgcctttatttgagccaatgttttttgaggtgaggctgtttcctaggcaatgtgagtgatgttcatttggaaaacaggaatgtccctgggtcttgagtaaagtgggttctggagcttcctttgcctagatgcccctatgctacctgggggaatgagttaggaggcatgtatggatgtgcccaggtccctgggtgttggactggactgtgctgggaggaatggtgccctccccactgcgtgaactgggaggcccaggcagggtggaggctcccccaagccaggggaggtcatgggactgtgagttgggggtgcagcccattgacagatgagaagaaactgccactcagtggacaccccccaagtgccttggggatgttgaaaagctctgtggattggtgcttgtctagcacaaccagaggagccaccccagttcctgccaggggctccccacctcccacacagagagtccagccacctggggatctaccactaatgccagaacagaggaaaaggaggggatttgacagactctcctactgcagaccccaagagaatcgcctgggactggatgtaatgcaacttgcagtccactcatggtcctctgcattgcacgatcaccatggttccagatactagatgctgtgttcagtgattgaccgggcattctctgtcgctgccactaaaacataagctccacaagctcagagtttttatctgttgttctcagaacagtgcctagcacagagtagatgctcagtaagtaaatatgtgctaaatacatgaaagaagcgagggagggaaggagggaggaagggagagaaggcaccatattccagaccaccgcgtcctttctgaacatgctccaccgcccctaggctgtctgtgttcttgccctcatccacaaaggtacccacatgaattcgtgtttgctttgcttggatctgttttgtatggatacactagaagtcacacactatgatgtttgaggtttccaagataaaaagaaagttcacagtgacaatagtttaagattctgcaaaagaaaggacattacattaacgatgtatttaacactcacaaaatgtagcataatctctacataatggcttacgcccagtgcccatgactgtactgggaagtcactatacccgggagctggccaaggaaggctgaagcttgagggctgctgacagtgaatgtgaggcattcggcatctcctcttatcactggtcaagacgtgttcagggctttgcaaagtcaagactgtacctgtagagaatgtcctgaaactataggcaacctgattttcatacaatctggaaacacaggagaagcaaaaggttccttcctctcctgtcctgtgtgtggtttctacacacttctcagaaagggtgaaataatgctgccttctggccgttttgctggtgcttaaaaattgaggagtttcaggatatgaattttggccatttctgtattgtaagattatggaggaattgttttttcttctttatacttttctgtattttatagttccttgacaatgaacaagtactactttttgttttattttttcctgagacggagtctcgctctgtcacccaggctggagtgcagtggcgccatcttggctcactgcaacctccaccctaggttcaagtgattctcctgtctcagcttcctgagtaactgggattacaggtgtgtgccaccatgcccagctaatttttgtatttttagtagagacggggtttcactgtgttggccaggctggtcttgagctcctgacctcaagtgatctgcccacctcagcctcccaaagtgctgggactacaggcgtgagccaccacgcctggcccaagtactactattataaagacaacagcaacaaaaaagttagaaaaatttatgggctgggtgtggtggctaacgcctgtaatcccagcactttgggaggctgaagtgggaggatcacgtgaagccaggagttcgagaccagcctgggcgacatactacgactccatctttaaaagaatttttttttaaattagctcatgtggcggcacgtattcgtagtcccagctactcacgaggctgagacaggaggatggcttgaccccaggagttccaggctgcggtgaaatatgattgtgccactgcactctggcctgggcaacagagatcctgtctttaaaagcaaaaacaaacaaacaaacaaaaaacttgtgtatttaagtttacaagttccaactcaattaaaatttcattttaagttagtccatatactaagggcccccacagaggtacaaatcctaacaaaagcaaaaatagccattgtccatagcagaagtcagactgaaagcaaaacgtgtgtgcctgtaaactgcccttctcttttttttcttttttttttttgagatggagtgtcactctgttgcccaagctggtgtgcagtggcacgatctcagctcgctgcaacctccgcctcctggattcaatcgattctcctgccccagcctaccgagtagctgggattacaggtgcccaccaccatgcctggctagtttttgtatttttagtagagacagggtttcaccatattggccaggctggtctcgaactcctgacctcaagtgagccgcccatcttggcctcccaaagtgctgggattacaggtatgagccaccacgcctggcccccagaagacttggatccttagaccacacaccagcttgccctggaagctttagtcctggcatgagcctctgcgaggggaatgtgttcccagaaagaactgcttgtggagaggaaggagttaaataaagaaccctgctgtcccagtaacctctccctccctcctgtagaactaactgtccacactgcccaggccaggtccccactgttaccttttcacaaccagaaaattgtagtcttgtccataaatggatttggatagattattcaagaagcgcagcaactcccttccaccctcacttgccctgaatcccagccccggaaagcaattttaatctctctacctcctccttagctgaaggcaggctttgcctaagctaattgaacactacactgaatttaacaagaaaaggacaagaaccagccccaggaaatgtagccctataagggccacaggccggcagattttgagaggaggggaatgctggcgtggtggcagcctagggctgccaggctctgggtgtgtgttgggagggggggttgggggtgtgtgtgtgtgtgtgtgtgtgtgtatgcacacgcactcacgctgggcaggggtgaaggggacaggccaaaatggaagtggggcaaagagtccaaggtccagacgctgagagctgccacctatctgtccagtgtcattctgtgtagcccctatggtaggctgaataatgacccccagagatgtccacaacctaacccccaacatttgcgaatatgttaccttccatgataaaggggagttggcagatgtgactaagcgaagggtctcgagacggaaagatgatcctagattattgggtgagcccaatgtcatcacaacagtccttgcatggggaagaggcaggcaggagggtccgtggaggaggggtggggatggaagcagagattagggtggtttgaagatggcttgaagatggaagcagggagcatgagttaaggaatgcagccgggcgcagtggcgcacgcctgtaatcccagcactttggggggccaaggcgggcgtatcacctgaggtcaggagttcaagaccagcctggccaaaatggcaaaaccccatctctactaaaaatacaaaaaaaaaaaaaaaaaaaatagccaggcctggtggcatgtgcctctaatcccagctactcagggggctgaggcacgagaatcgcttgaacccaggaggcggagtttgcagtgaccccagatcacaccattgcactgcagccaggagaacagagtgagactccgtctcaaaaaaagaaaaaaggaatgtggcagccttactagaagctgcaaagggcaaggaactgattctccccagagcctctggaaggaccacagccttgccaatccattttgggtttctctctttcttccttccttttttttttttttttttgaaacaaagtctcactctgttgcccaggctgcagtgcagtggcaccatctcggctcactgcaatctctgcctcctggattcaagagatcctcctatctcaggctccctagtagctgggactacaggcatgcaccaccaccctccctttcttttcctattcttttttatagatagggtctcattctgttacccaggctttgggttatatggaactgatgtcccttccttttttatagacagggtctcactctgtcacccaggctggaatgcagtggtgcaatcatagctcactgcagcctcaaactcctgggctcaagtgatcctcccaactcagcctcttgagtagtcctctacaggtgcccaccaccacgcctggctaatgttttattttttgtagagacagagtcttgctgtgttgcccaggctgttctcaactcctagactcaagtgatcctctcatcgcagcctcccaaagtgctgggattacaggcatgagcacccagccccatttgggatttctgacctctaaaactataagagaatgaatttttgttttaagccactaagtttggggggatgcattaccgcagccataggaaacgaatccagcttccaagaactgggggcccggccagacctccatggggtgcactggcaaaagagactggcccacccatctctgagctgggcatcctcagcctggttccctgcatcttgagagtcctacatggaagggtgaagtcccttagtgtggccccagcatttcaaaaccccttggaagccacccatgtgctcccaggcaggcttcctaagaaagtgaaaacatcgagtttcttcatttgtggctagtattgcaccccttcagtgtggcaatgtggttctgtcaccagaaacgctgactggcaacttctgtatggttgcaaaaccgggactggattcactgagactgattcctacggtgtggttctgctgtggcaaggcaagcacaggtgttttttttttttttttgaaacggagtcttgctttgtcgcccaggctggactgcagtggcgctatctcggctcactgcaacctccgcctcccgggttcacgccattctcctgcctcagcctcctgagtagctgggactacaggcgcccgccaccgcgcccggctaattttttgtatatttagtacagacgggtttcaccgtgatagccaagatggtctcgatctcctgacctcgtgatcagcccgcctgggcctcccaaagtgctgggattacaggcgtgagccaccttgcccggcccagcacaggtgtttttgagatagtgactgttgctatttccttaacaatctacataaaatgagcacccatcaggcagaagccggtgacatcttcacttctgtttctcacatctctgttttatgggctcttttaaaaaaattatgtatttatttatttaatttatgtattttgagacagagtctcgctctgttgctcaggctggagtgcagtggcatgattctgcaacctctgcctcacggcttcaagcaatcctcccacagcctcccgagtagctaggattacaggcatggaccaccacacccgactaatttttgtacttttaatagagacagagtttcaccgtgttagccagctggtctcaaactcgtgagatccactgcctcggccctccaaagtgctgggattacaggtgtgagccactgcgctcggcctatgggctctttttttacatattggcatagccaaagaccaagcccttcccaagacacgtatacacatgcatacacacacacacacacgaggaagtcatgctcttgaaggtgaacaaactcagagaatacaagatttacaagaggttcaagtacacactttccaaacccgaaaagtaacagtaatcaaatcaaaatacatgtttggaaaaaagattcaaatgtattttttgaaagcaaagagagtcacaataaacaaggtaaagagtatctgaaagggtattcatatgtatgtttgcaaagaaagagagtaagaataacaactgtttttcactttcagaatatgtgacattagattctttgggttatatggaactgatgtccctcatgaaaaattgtcaaggagttgggggtgtgtagggagctccaggtgattctttcaggtgaaatcgtgcatgattctgggtccagtgaaggtgtatagcggaaggaggctcccacagaaggtggggttgacacaggctggaaagcatggctgcaagggaggttgggaatttgaattttctggaagcagtaaatactcacaagactgaaaatcctcccagtacagcaagagcgttccaaagattctggacagtcagaaatcaagataaatggccattacccttacctcatagatgtgttatgagggttggcagagcgatatatacagcacagggcaggaggtcaataaatggtacctcttcttattagaggatatgggcatagctcccagtttgcccacagccttgtagtgactcatcagatgccccatgggcctcctcctggctgtggcttacagaaggggtccccaaccactgctcatgaacagggttgagctacaagcaaagcttcatctgtgtttacagccgctccccattgctcgcccctgagctctgcctcctgtcagatcagcagaggcactagcttctcataggagcgtgaaccctattgtgaactgcacacgcaggggatctaggtcacacactcctcattagaatctagtgacagatgatctgtcactgtctcccatcacccccagaagggaccgcctagttccaggaaaacaagctcagggctcccactgattctacattatggtgagttgtataattatttcattatatattataaagtaataattatagaaataaagtgcacaataaatggaatgtgtttgaatcatcccgaaaccattcctctctgctcccccgccccccaccccccgcctggtccttggaaaaattgtcttccacgaaactggtccctggtgccaaaaaggttgtggaccactgccttccagcagctgctacctagcatgagcccttggttaataaactgctcctactcatgcccaagctgccaggtttttcctggaagtctgcaggatcccagagtgcaaaattattattattattattgagacagagtctgctctatcacccaggctaaagtacagcggagcgaccatagctcactgcagctttgaactcttcggctcaagcaatcctcccatatcagcctcctgagcagctgggattataggcataggccaccattcccagctaatttttatttttaaaaattttttgtagagacgaggtcttgctgtgttgcccaggctggtctccaactcctgggcttaagggattcttcctgcctcagcctctcaaagcactgggattacaggagtgagccaccgcacccagtcggcgagcaaatttaaacacacagaaaaaatgataggctcttaatccttccaggaaatggggattggtttgagtttttctgaattacaaaacccaagaggattcgttacacaagtcctgtcctgagaactcatgaaaaaaaaaatctcaggcctgggccttctagttattactggcagcttcccaggccctgggctgtggccctggggttgtgggtgcttttcctacataccaaagtcaggaatattaaagcttcgtatacttaaaaagtgtaggagtctcctgtttttcaaggagttaaaaaggaactggaagattttcttttctctgcctgttgtctcttctccctgacaaatttcaggatatcggccgggcgcagtggctcacgcctgtaatcccagcactttgggaggctgaggcgggcacatcacatgaggctaagggttcaagaccagtttggccaacatggtgaaaccccgtctctactaaaaatacaaaaattagccaggcatggtggtgggcgcctgtaatcccagctactcgggaagctgagacacgagaatcacttgaatctaggaggcggaggttgtaatgagccgagattgtgccactgcactccagcctgggtgacagagcaagactctgtctcaaaaaaaaaaaaaaaaatcaggatatcattcattccctgttttcaggaggaattaaatatagaatgctgtatgtgtaatagttactcttgtgagggtcccagacaggaggcaaaagactagagaagacttggcattactggaatgatgttttatgatggccccactggggaagtagaaatgcaacaagtgtaggctggtgaaaggagggggctgtggcccatgacaaacagcaagaaaaacccagcccatcaccggagacctaagggaattcatcctttcgctaacatgccaattcctctgaccttgatcctggaatttcttgaaacaagggggcaccaagtcacatatcagggccccacttggtaatgatcaaggcctactttgagctcggacctcttacagctctgttgaatccagggaagacactcacctacccactcacaggtgtcagcggccctgcctttggctatgtcaatccccacggacaccaacgatgacacaaaatggcagcaaacagtggaagatggtagtcagagaaggcaacagagttctcaggaaatggagtccagaagttgtagaatttggactgtgggtatggcaggagtgggggttgggggaggcgttgtagatgaaggcagggagaggcgcaaacaggtggggtgaacagcagaggaagaggcagacaagtagggcacatgtgaccttcacgaagtacaatttcaaagactcactgatggaatagccgggtcatggggagctgtggagcgcttgactgggcacagagctgggtctcattacgagaaaactgaacagcatgatgagaagtttgctgtgaaatgcagggggctttggcactagacaggcctggctaggagcccacactgccactcattggctgtgtgatttggggcatgctcagccagattttgatccaacaagcaaaaccatcatgtgatgtgatgtgtgtgtgtgtgtgtgtgcgtgtgtgtgtgtgtgtgtgtgtgtgtgtgttgttatattacagagatttgacctcacataaacatgagagatgtgtgcacagtccaggagagacaattttcccctgtccggtgctggagcctgaagtcctcagggcaggaggccgggaagagaaggtggacaagagatggaggaagcagggacaagctgaaatctaaggctcagctgccaccctcctcaccctgctctccatctccacacctccagcttacacgaccacatgagatccacggggagctggaggagcctggagcctgtctgcatccctgccatctaggacatcagcagagaagccacaggtcgggagctgcaaagatggatgccttgtgccctgccccagcctcccaagggtaaaggaatatggctgcacctttccttccatcttccaagtctcgcacattgctagggtttgaatgtgtccccaaatttcacgtgctggaaatttgattcccaatatggcagtatggaggaatgaggcctttcagaggtgattggttatggtgatcctgccctcatggatgggtggattcattcatggactaatgggttcatggaccaatggttatcatgggagtggggctggtggctttataaaagaggggatgggcatggtggctcactcctgtaatcccaacactttgggaggccgaggcaggtggatcacttgaggtcagtagttcaagaccagggcaacaggtgaaacaccaactctactaaaaatacaaaaattagccgggtgtggtggcaggtgcctgtaatcccagctacttgggaggctgaggcaggaaaattgcttgaacccaggaggcagaggttgcagtgagccaagattgcaccattgcactccagcctaggcaacagagtgatactccatctcaaaagaaaaaaaaaaaaaagaggaagataaatccgagcaccttagcaccctcagccccccttgccatgtgatgccctgaccacctcatgactctgcagagaatctccaccagcaagaaggccctcaccagatttagtccctagaccttggacttctcagcctcccaaaatgtaagaaataaatgccttttctttatcaattacccagcttcagatattctgttataagcaacagaaaatggaccaagacacacacaaacatccttccctgcccatgttacctcagaacttttcagggaggggaattctaggaaatgcagttacagtttagcagacctactgcagtgcaaacccaccacaggccaagtcactgaactctgctagtgtccccatgggacagccatcgcctgcctaactgggaggtctgagtgttataatacctagagaagcaccactggccagcaaaaaatgttggcttctttctgccatcccccacccactctcctgagggaggtgagaggagtccctctaggctattagaaatgcttcaggaagatcaactgattacaaggtaaggaattaatggaaagggatggtgcagattcagggtttgtagggctgaagtgtatataatagatggagccctctttataaacaaatacacaactcactataaaattaggcacaaaagtatttctttttcttttcttttttttttttttttgagatggagccttactctgcactcaggctggagtgcagtggtgctgtctcagctcactgcaacctccatctcccaggttcaagcaattgtcatgcctcagcctcccaagtagctgggattacaggcacctgccactatgcctggctaatttttctatttttagtagagatggggtttcaccatgttggccaggctggtcttgaactcctgacctcaggtgatccacccacctcggcctcccaaagtgctggaattacaggtgtgagccaccacatctggccaaaagtatttctttagaatgatatacaggttacaattttttttttttttttgagacagagtcttgctctgtggctcaggctagagtgcagcagcatgatctcagctcacggcaacctccacctcctgggttcatgtgattctcctgtctcagcctcccaagtagcagggattacaggcacatgccaccacgcctggctaatttttgtatttttagtagagacgagtttcaccatgttggccaggctggtcttgaactcctgatctcaggtgatccacctggctcagcctcccaaagcgctgggattagaggcgtgagccaccgcacccagccatcaaagatgtaaccttgaaacaaactgcagaagccttttcccttagccttaaaatggactccatgtccctcccttcttcaccgtataaactcccttcacatttatctaactgtatgcccgtgtctagttacgtgccttcttagaggttccagacgctaatcttgagacagacagaccaagcctggagattcttctgcaaaattccacatgtgacctcaaggcgtctaattaagaatccagccattgttgagatgatgccagaccacaggcttcctgtggactaggacccaagacagccaccggaacaagacaaacagacagtgtacttagcataatccttgcctgacttccacatcgttttcccgttttaaacccttgccttggccgggcgcggtggctcacgcctgtaatcccagcactttgggaggccgaggcaggcagatcacgaggtcaggagatcgagaccaacctggctaacacggtgaaaacccatctctacaaaaaacacaaaaaattagccgggtgtggtggcgtgcgcctgcagtcccagctactcgggaggctgaggcaggagaatggtgtgaacccagaaggcggagcttgcagtgagcggagatcacaccactgcactccagcctgggtgacggagactctgtctcaaataaataaataaataaataaataaataaataaataaataaataaaataaataacccttgcctttcccactccccataccccacaattcaacgtgattgctttggggataggaatccaaccacttccccttgctagctttggaaataaagtcactttctttccaccacatcttgctcttgttagactctgcaagcagccagcgactgaaccagcattcggttacatcccctgaggcggatgacacttgtgtgatcctgtaaccgatttcttgttagaatgttggcatctttcacccagtcgttttcttgtaattttatttatttgtttgaaaacagaatccttcttgcaatcctgtcattttcagtgccttttttttttttttttttttttttttttttttttttttttgagacggagtctcggtctgtcacccaggccggggtgcagtggcgcaatctccgctcactacaacctccgcctcccgggttcaagtgattctcctgtcttagccctccaagtagctgggattacaggcgccggccaccacgcctgactaatttttgtatttttagtagagacgggtttcagccatattggccaggctggtctccaactcctggcctcatgtgatccgcccacctcggcctcctaaagtgctgagattacaggcgtgagccaccgcgcctggcatcagtgcatactttttgaagtgattccaagttatcgcccgcttttttcgtgtaacatataaatacatctctgtatctagaaatatccaatgcataattcaattgtctgcgaggtatttcatcacgtattttcacgagcgtggccaatttcaaaatagttctacaaagaggaaatgcaagaatgtgggaagagcaaaagaaaagctctatgttgcaaaacccatttttgctaacgtgtccagtgggctcccgggacgacctgtttttaaattcttggtctccctgcaccgcgtccctcctttgctgcgctagctttatgacgcatcttggaagaacagggcagatttaaaaccctctcccaacaggcgtcaaacgacatggtgcaggctcgggctggggagcgggcctgcggctgcccagctgctaaaggacttcctactcgtgcaccgccgccggctccagggcaaaccccacgccatttagaaatgctggaagtttctgtctctccctccccctgctcggaggccattccccccacccccagagccccacctcctccttcactgggccctttctaactccttccccttaaaacccttttcaaaatggggttgactggaggcggaggttgcagtgagccgagatcgccccactgcactccagcctggtgactccgtctcaaaaaaaaggggaggggggcgggggagagttgaaagcttaatatgtactttgggggctattaaagcaaacatttcgactaaaggggcgaatcctcgaattgtgcgatcaagcacccgagaggagagttggggggggtcaggaggggtgggggctccagggaaagcccgggggtctgggccggggtctcgcggggcccttccggaaggatcgcggcccccgaaggtgggcgtcccgcggggctccagtctccaggacgttccgggaggctccgcgctctgggaggccggctgcgtggggtccccgcgctgcagccgcagaggccccccagggccgcggttcccggagcgggaaagtcccgcgcgggggcggtggcctcgggggcgggacggggcgggggcgggggcgcgggcggccgagccgaatcccctccaccgggacgccccgctgctgctcgggaagaggcgggccctgcgcgccctgcgctcgccatggcggtttgggcggcgacgtgagcggctccgcggaccccgagcggggccccggccgcgacctgagccgccgccgagcgcccggggccatgcgaccgacgctgctgtggtcgctgctgctgctgctcggagtcttcgccgccgccgccgcggccccgccaggtgagccgggcctgggcctccgcggcgggacgcgggcgcagccgcagcatgtgggggctgggggactcccggatcgtggggtggggggaatctgccgggtgctcagagtgggtgggaatctgcggggtgctcctggtgggtgggatatgcggagtgctcagatcaggtgggaacctgcgggtgccccaggtgggggtcttgcggggtgcccagggctagaggggcccgctgggagcccgcagcggggctgggatgggcggccaggagttccagacaggagctgggcagcagcaggaagacggggggcacccctcctggcgtcctggccgccgggacacccctctccgggagaggacactcggtgcccctccgtgaagccggtaacctcggctgcgccacctcccccacccgcgcgcccgcgccgggaaagccagcgtggccccagtctccgaatttctcggaatgaacaacagcaaattgaatccagggctccggcgggggccgcctttgctggccactggttctgcagcctggcgagactgcgcttagtccccgcctggagtgcctcccgaaggcctggctggaagctagactcagtccctttgtagtagcagcggtggagcagggaccagcgtcttggacgggtgacccagactcaattccgactttggccgagggcatgtttgacactgggtgtgaaatctagacagttcccgcggtcatagagatggggcagcagcattcaggcagggctcagaactgtccgggtcccatcagtgttggggcggaagaggaagagtgtcaactgagccaggcatttatttattttattgttgtttgagacagggtgtcgctctgtcgcccaggctggagtgcagtgggcagcatctcagctactgcagcctccgcctcccgtgctcaagcgatcctcccacgtcagcctcccaagaaggtggtattattggccacgcctggccaatttttgtattttttgtagagaggaggtctcactgtgttgcccaggctgttcttgtactcctgagctccagcaatccacccgccttggcctctgaaagcgctgggattacaggcttgaggcaccgtgcccagctgagccaggcttttaaaaccggttctgtccctacccagagagcttcttacctggcggcctccttaacctctgacaccagctgaccacgcttatgagccaaacataaaaaccaaaagaaacccaggcttggtggctcacgcctgtaatcccagcactttgggaggctgaggcagcatcatgaggtcaggagttcgagaccagcttgaccaacatggtgaaacccccgtctgtgctaaaaatacatagctgggcgtggtagcgcccgcctgtaatcccaactactcaggaggccgaggcgggagaatcacttgaacccgagagctgagatctcaccactgcactcccgcctgggcgacagagcaagactctgtctcagaaaaaaaaaaaaaaaaaaaagaaaaagaggaaaagaccttaatgacaaatgtgtggctagaacattcttgtgtatgtatctgcttttgttttgctgggttctttcccctggggagagtgatatcataggagtctcgagaatttagaagattcttcccattcgaagctataaccttgtgttgtgggtttgttttttctaccggcattccttgcaaaggcccataagttccgtatctccttgatctggggtgccttgcacttgaggaaattattaactgcttttccatgggagtcagacagatgggttcaaatcctgactctgcttccacttggcttcacgtcttgagcaatctgcatatgcctcctccctaggcctcctcctaatgagagttgatgattgtcctagtgtgggatcagcaggcgagtgacttcatgccagagaggagtgactagtggtgatctgtggactgtttgtgacttacctgtgatgagtccagaggttgaaagatgtatttagaaactatagtctgacattgccacaacatccagctacctgtccatcttgttaatgattaactttaattgtattctacaaaagttttggtctatgtgatatgttgcaaaataaaaaaattttaaaaagtgaggccaggctcggtggctcacacctgtaatcccagcactttgggaggctgaggcgggcggatcacctgaggtcaggagttcaagaccaggctggtcaacaatgatgaaaccccgtctctaccaaaaatacaaaaattagggggcgtgatggtacacacctgtgtcccagctactcaggaggctgaagccgaagaatcacttaaactcaggaggcagaggtgcagtaagctgagatcacaccactgcactccagcctgggcgacaagagcaagactctatctcaaaaaaacaaaaacaaacaaataaaaaaactggctccattgatcctttgaaaagtagtagcagctgggcacggtggctcatgcctgtaatcccattactttgggaggcagaggtgagcagatcacctgaggtcagaagttccagagaccagtgtggccaacatgttaaaaaccccttctttactaaaactacgaaaattacccgggcgtggtggttggcgcctgtaatcccagctacctgggaggctgaggcaggagaatcacttgaacctgggaggggaggttgcagtgagccgaaatcatgcaactgcactccagcctgggtgacagagcaagactctgtctcaaaaaaagaaaaaaaaagaaaagaaaagtagtgtagtgctttaaactaatctctattttgcaactatttgaacattttcacattaaacagcttaaaaacaaacctaatggatatcttcaaaagaaacactcttttagtcaaaacacaaagtgaaaatattcacaatgattatatggcaaatgggtggtagaaaggttttcacactttcccataacttaccggtgtaattttgaaattgcttttatggtcagagaaaaaaaaaagtgttggaaactttttttttttttttttgagatagtatctctctccatcgcccaggctgcagtgcagtggcatgatcacagctcactgcagtctcaacctcttgggctcaagccatcctcccacctcagcctcctgagtagctgggactacacgtgcacgccatcatacctggctaatttttgtatttttttgtagagatgaggtttcaccgtgtttcccaggctggttttgaactcctggggtcaagagatccacccgcctcagcctcccaaagtgctaggattatagatgtgaaccacccagcctggctccggaaacagattttttaaagggagacatagtatctatcccttagagttctgtaagagtagaatatgtaaaatatgggacctgtggcaatttgtagccatgagctgttaagtagtggccgtttgcgctagatagaaaaatgtaaccaacagcacaagtgcagtaaatcaactgaccagttagttacctgagtgttgaggaattaaggcttctatttgtaattgtagcaggtgctgctgactttttcaggggattggatatgtactgtgccacagaattttttatcattatttgctgacttgaacagccagagcttctcatatgcttagagaccaccgagaaagacagtaagtccccagcaacttaaaaaccattgcatgtgaatgtccactgggtaagctcctgagtgttcataatctcagcaagtgaaaatatcatgtagctggaatgcttttgccacctttataaacgatcatgatagtaacatttattggtcagacgagatgccaagtgctttatatacattacctctcttaattttctcagccattctttcgaactaggttatatctctagtttacttcctggaaagtcaaacctttcttgataggaagagccaaataatctaggtcaataacttgatgtccagttgttgttgttgtttttgagacggagtctcgccctgatgcccaggtgggaatgcagtggcgctatctcggctcactgcaacctctatctcccaggttcaagcgattctcctgtctcagcctcccaagtagctgggactataggcacctgccaccatgctttgctaatttttatatttttagtagggacggggtttcaccacgttggctaggctggtctcgaactcctgacctcaagtgatccccaccgcacccccccccgccaacccccgccagcctcagcctcccaaagtgttgggattacaggcatgagctaccatgcctggcctagtatttcttgaagagaacaatttcctggttatggctgaggaatcagaaaatgcctttttatttctcatctgcaaggtgatggaggtgggatcaatgatgttcacctaattgactttcatcataatgtccccgcccccaatagaaagatcctaaagggtcagtccttaattatcaagattaaatgattaatgttaattatattttattttattatctgtgtgtgataagtgttaatcaaactatgctgttaagacccaggatatcctcctattctttttgtttgtttgtttgatatggagttttgctcttgttgcccagctggagtgcagtggcatggtcttgactcactgcaacctccacctcccgggttcaagtgattctcctgcctcagcctcccaagtaactgtgattacagtatgcaccaccgcacctggctaatttttgtatttttagtagagacagggtttcaccacgttggtcaggctggtctcgaactcctgaccttaagtgatctgcctgcctcaacctcccaaagtgctgggattacaggcatgagccaccgcacccagcccctcctattcctaaatatgcataaagtctgaaatgcctggatctgggataggtagatcaaaggtgttgggatgggtcaggaaggcagagttgttcattcacctcttcactggttgttaaatggtcctagtgtttggccctgagtgtataaaaatgattaagacaatgaatgtagagaatagtctacttagagaccttgtcagaatgtctgtattaccatgtgtactataatagatacacatacactatgtgccatgatttttcaaaagtgctagaatagaaatatttttaaatgttataggacactacttgccaggaagagttgaagaaagtccaatagaggaagaacaaactgagctgggttttgaagcatggagtttcagattaaagaaaagaagaaaaggccaggtgtggtggctcacgcctgtaatcccagcactttgggaggccgaggcaggtggatcactaggtcaggagttcgagaccagcctggccaagatggtgaaacgctgtctctactaaaaatacaaaaattagctgggcacagtggcgggtgcctgtaatcccagctactcaggaggctgaggcaggagaatcgcttgaacccaggaagtggaggttacagtgagcctagatcgtgccactacactctagcctgggtgacagaacaagactgtctcaaaaaaaaaagaggccgggctcagtggctcacacctgtaatcccagcactgtgggaggccaaggcaggcagatcaggaggtcaggagatcaagaccatcctggctaataatggtgaaacctcgtctctcctaaaagcacaaaaaaatagccaggcgtggtagcaggtgcctgtaatcccagctactcgggaggctgaggcaggagaattgcttgaacctgggaggtggaggttgcagtaagccgagatcacgccactgcgacactgcactccagcctgggggacagagtgagactctgtctcaaaagaaaaaaagaaaaagcaatatgcaaaattatgtaggtccaaaataaaataggatagagtttatggtattttagcgagtggtggtgattggtctgggataagatcttgaaggattttcagcttactcaagtctgaactctaccctccatgccaggaatcggcaaagtttttctgtaaagaactagacagtatgcactcagatggttacagaagtttgattaaatggctgatttctgaattaggtatggcgcttgagactctgcctagggagagtgctcaggtcatgcttatatgtgaaaatgtgtcgttattttttcctcttgctctcacacatgtcccttggtttcctaagtgaggttttgaaaatgaaattttgacagttgagccaaaatgccctctataagcacgtgtatttccttctttaaagaattccctctcaggaattccctctctaatgtattgtaagatttggggttcgaccattaacgcattagtccagttcaataagcttcatttttttttgttggtagcagggtccattttatgggcgaacataccagtaagttccttgccttcggggaagtttaagtttattaaaagcagttacagatatattacagatgtattatacaggaggttctcaagaggcaagaaggttcagcaagttcattgtcttaattacaataattttttttttttttttttgagacagagtctctctctgtcacccaagctggagtgcagtggtgcaatctcggctcactgcagcctccacctcccaggttcaagtaaattctctggctcagcctcccaagtagcttgaattacaggcacccaccaccatgcctggctaatttttatatttttagtaaagatggggtttcaccatcttggccaggctggtcttgaactcctgacctcatgatccacccaccttggcctcccaaagtgctgagattacaggcgtgagccactgcggccagcctacaacaatttttttttttttgagacagagtctcgctcttgtcgcccaagctggagtgcagtggcgtgatctcagctcattgcaacctccactgccgggttcaaatgattcttgtgcttcagcctcccaagtagctggaaatgcaggtgtgcaccactatgcctggctaattgttgtatttttagtagagacggggtttcaccatgttggccaggctggtttcaaactcccaaactcaggtgatccgcccacctcagcctccctaagtgctgggattacaggcgtgagccaccacgcccatccaattagaataactttttacatgttgtatttttaaaattcataactcataatctaaaatttatgctcagcacagctaactttggagacctaccaagaatggtgcaatgattcagcagctactcatggtaagacaagagtatctgggtgtaacctgtatgaaacctgcatctcacaaccactgctccttctccccagccttccagccctggtgtttcccatcgggggccatgtggcctggaacacagaggctgggctgcccaaggacaggccccctggcctacaaaaaggacagtcttatcacagatgtgcaatccttggcacttccctgtggcgtctgcagttctgagactgattttcttctataaatgtgaaaagataggggatgataggaaacccggatataaggcagaacaatgttgcttgggccatctcttacacctcagtgaaacggaaaatgaaggaaatggaaggctggcatgggaaccccgacttatacagtgatgcccttttgctgttccacgcgtcgcttggggtggaagcccttccttgtcccctcgccacccaccccggagccccttggtgcttcctttctgaactgaatgcttagactggggaactagaggtgcccggaaagggaagtcgggaagaagagactattcctgttggttcctccccagagatgggagatggtgaacaggcgtgtggagggcggaataatggtccccaaagatgtccacgccctcatcctcagagtccgtgaacctgggaatgtgctgcctgacgtacaaaagggactccgcagatgtgagtaagttaagagccctgatgtggggagattgtcttgcattgttgggccaagtggccttataccaccacagggtccccaaaagatggagcagaggcagaaggttcagtaccagggagacaagaaggatgcggccaaccttgctggaggaaggtgccctgagccaaagaatgggagtggcctctagaagctgggaaaggcaaggaaatggattctccctggaggctcgagaaggaccccagccctgctgataacttgactttagtcagtgagactgactttaaacttctgaccagcagaactataagaaaataaatttagatgtgattttttaaaatttatttatttttagagatggggggatctcgctatgttggccaggctagagtgcaatgattattcacaggcatgatcatagcacatgcactacagcctcgaactcctgggctccagtgatcctcccgcctcagccccttgagcagctgggactacaggtgcgcaccaccacgcccagctaaatctgggttgtgtggagtcactaggttagtgataatgtgttacagtgataagaagaacctaatacaggaaataaaaggagttgtcagattctttgaatgcccaaccctaagcagacactcaccctgttcctggaaagagccgggtccagctgcgttttctcatggcccaataacaagaagcagacaaactaggaagaaagagaatttattgctgtaacaggaaggtcggagataatccgaccagaccaactcaaagtgtttgattttctttgtgcttacataggtttgggttatgtgcctatgtgtggtattgcactaagtctatgagtaactaattttgtttcaactagaaagtcagaggccaaaaatgtgctttctaagtctaatcaagctgtgaggtccccgataccgtcaaggcctgtctcctaaattctatttaatgaggactgtggtaccagagcatttatttatttatttatttttgagacggagtgccgctctgtcgcccaggctggagcgcagtggtgcaatcttggcttgctgcaacctccgcctcccgggttcaagcgattctcctgcctcagcctcccaggtcgctgggactacaggtgtgtgccaccatgcctggctaatttttctatttttagtagagacagggtttcaccatgttggccaggctggcctcgaactcctgacctcaggtgatccaccacctcagcgtcccaaagtgctgggatttcaggcatgagccactgtgcccggccaggagtttatttctatcttgtctcatttacagtttggtccggagagctgccttagactctccaataaatctattcaaacagctgcctctgttatcttgacttgctccaggtttggaagaagcctgtgtaggatctgtgtttcatttctggctttgatgtctgggcgtcagtttccctggggttaattattagcttaatgtgaaggcagcattgtggaaatttctctgcatagttcggatgctattcagatctgtctgtgtgactgtcatgcaggcctctctgtgtgactgtgagggagcattgacctgccaccacccccctctggaagcatccagtccccaactggctttgggcattgctaggtcatagcagccacagcacacctggtgggcctgcctcttgccacgcagctttacctgtctgccttcggcccaggatgtcatgaggcctgctgtgtgtcaggagaagtgttgttagctggttgggtgaaggtcacccagagctcataggtgtggaggggaggggcatcctataactaaacaaatggccgcagacttggcaattcatctttcagaagaagagccagtggtcaggctgtcagctgatctctttgaggttgagcgcatttaccgaaaatgtgtggcttgaatttcctgctttgaattttggaacagcatgtttttcaaacctttcttccaccttctgggcatttcttattaatctttttggtcaaaagccttatcttgattatgttttctttctaagacaaagggctccctgtgaagtacctgcttgggaaagggaggagttgtggcagtttcttctaggtccccgaaggctccctgtgaagtacctgcttggggaagggagaggttgtggttgtttcttccaggtcaccccaaagagagggattctgatattggtggtgtttccgggggagtatattctttctctgtttattgccccctaacctttttttttttttttttttttttggagacagagtctctctctgtcgcccagactggagtgcaatggtgcgatctcagctccctgcaacctctgcctcctgggttcaagcgattctcctgcctcagcctcctgagtagctgggattacaggcgctcaccaccgcacctggctaacttttatatttttagtagagacagagttttgccatgttggccacactggtctcaaactcctgacctcgagtgatctgccttccttggcctcccacagtgctgggattataggtgtgagccactgagctcgggccgtgttgtcctctaactttaatgtgtgtgagaagcagctggaaagcttgtttaaaatgcagatttcctgggggcctcaggacctgcactttaaccagcacccctgtgattgcgatgctgggggtccttgagagacgacaactctgatggtgcccagaagtcggcgttccttgccctcccctgcagcttgggctttgcgtacctgatttaggatgtttgtgtgtttttgcgtgtgtagtgtgtgcacgtgtgcacgtatttgcggacatttaccagacacttccttggtactaaatctgaagctaacgcgtgtcacatgatcaccacgttaatcttcgccacagccctgtgggtgtatcattattgaccccttattcctgaaaaagaaaactcaagctcagacaggtgaagtgacctgccccgagcctaatgcagttactaatggtagaactgggaccccagtccggccagactccagggcccaggacctgttcgtaacaactgggacctgcaggtggaaaggctgccccaggcgcctcttttctttttgtgctgcctgtaccagtagggccatctttgtagccaaaagtcgggggtgtggggccatgcccagggggacctggtaatgccatttctgcactttgacaaaaactgagttgtatgaatgacttagataatggacattgaaacatttttgtaattatttccctctctctcctcccttcctccctcttctttttctctgtccccctcaagaccctctttcccagctgcccgctcctcagcacccgaagattcgcctgtacaacgcagagcaggtcctgagttgggagccagtggccctgagcaatagcacgaggcctgttgtctaccaagtgcagtttaaatagtaagccggtatttctgttggatccttgctgggagctgtgggggcatcgtgcggaaccctggggccacatactagtccctgcctctgtgcagggtttgttatcaaacccgtgggaaacacatcgttcttggagcttgtaaaatctctgaggacagaggtttcacagcctcccactcatctgaaggcttaaactacactggcagtcaggactccgctgtctaaccacacgggttcttgctttggtggaaagttcattctttcgctggtttcaggagaaaggttgtaaaaataggcttccaccatggaagaacaggaggcagcttttagtcttcatcttcgggcttaaaaatcggattgatttaaccttatagaccaaatatggcctgatcagaaatttgtttggttaattacaatgaattctgagtttctcaactggttttccattttgcatattatcctggctctttcatctgtctcttgcctcttcaagcttttgcagaattggccatcacttgatttgcaatataaatacatatagaaagagggcaaagtccacatcctttgttattttttgtttacgttgttaagtaggttaattgaagagtaaggtgaagttattggctaagtcattttgtactatttggtaaaccaaatgtaaagacatgatgatgtccagtgcttgtgagatgggactggttcatatgtgttcacctgatgctgtttgcagaatcaattagcatagccctttcaaagaggaattctaccagacatttgaagtcatggaaatgtccatagtagttttccaatgtgtgtgtgtgtgtgcacgtgtgcatgtgtgtctgtttgttgttgttgttttgaaacagagtttccctctatcgcccaggctggagggcaatggcatgatctcagctcactgcaacttccacctcctgggttcaagtgattctcatgcctcctgagtagctgggactacaggcatgagctaccatggctggctaataggtatatttttagtagagatggggttttgccatgttggccaggctggtctcaaattcctggccccatcctcaagtgatttgcccgcctgggcctcccaaagtgctgggattgcaggcatgagccaccgtgcccagccttcatagtagttttatcctacacagataattcaaccccccatcaaaaaaaagagagacaaaaactataatcatgaagagatacatggaagtgtatattcatatccatcagtaggaaagtgaccaattttagcctgctaacttacgcttgaacactaaaccacagacagccaatagaaaggataattagatgtcatctggtagaaattgcaactctgtaaactttggcatgtatttgtattttttatttcttatttttgttacttaaaaaaattttttattcacttttatactgaaaagttgcaagtggtatgtatttattgtcaagaatagaaaggggccgatcatggtggctcacacctgtaaaagaatagaaaagtaggccaggcatggtggctcacgcctgtaatcccagcactttgggaggccaagacgggcggatcacgcggtgaggagatcgagaccatcctggctaacacgctgaaaccctgtctctactaaaaatacaaaaaattagctgggtgtagtggcgggcgcctgtagtcccagctacttgggaggctgaggcaggagaatggcgtgaacccgggaggcagagcttgcagtgaaccgagatcgtgccactgcactccaggctgggcgacagagcgagactccatctcaaaaaaaaaaaaaaaagaatagaaaagtaatgtggaaaaatgacaggcaattgatttgttagaggagtaggtttccaggtaacttgtttttctttttctttttctttttttttttttttttgagacaaagtctccgtcacccaggctgaaatgcagtggcacgatcttggctcactggacctccgcctcccaggttcaagcaattcttatacctcagccttctgtgtagctgggattacaagtgtgcaccaccccacccggttcagataacttcttttttttttttctgagacaaggtctcactctgccccccaggctggagtgcagtggcatgatcatggctcaatgcagccacaatttcctggctcaagagatcctcctacttcagcctcccaagtagctgggactatgggcgcacactgctgtacccagctaatttttaattttttgaagagatggggttttgccatgttgcccaggctggcctcgaactcctgggctcaagtgatccacccacctcaacctcccaaagtgctgggattacagacatgagccatcacactggcgtttcttatttgtttttaaatgtccgttgtaacagtatttgcttaatagaaacaggtgctaaactgaggtttgagagttatctctaaatcacattgatctgttcctccagtagttataaattacgaacattaagttacctgtaattaatggagcaatccaccagagcaggctacacaatttgcaagacccagtgcaaaatgaaaatgtgagaccctttatttaaaaagtattaagaatttcaagatggcaaccgcagagcatcaaatgaagtgcctttctgagaacgggcttgatgtgagcgcacaggtcacatgtcaggaagttggccctaccctcagcattcagcaaacattacaccctagagctaaacaagaagcttgttgtgagagtcacggctgatgtattgacttaggcttgatgctgatttatgggctccttggccttgaacaaggaagtacgtttactgattttcagaggagatgcttctaaaaatgggataaaacgttattgcattaaaaaaaaaaacctttgatagagtttcatttgataaactaacctgtttcactttgtcttcttttcaaaaagcattttatagatattttctcagggataaaggttggttttattttttatttatttatttatttattttgagacagagtctcgctctgtcatccaggctggagtgcagtggcgtgatctcagctgactgcaactttcggctcattgcaacctgcggctcactgcagcctccgcctcgtgggttcaagcgattctcctgcctcagactcctgagtagctgggattacaggcacccaccactacgcccggctgatttttatatttttagtagagacagcttttcaccatgttggccaggctggtctcgaactcctgacctcaggtgatccgcccacctagcctcccaaagtgctggaattataggtgtaagccatcacgcccagcctagaggttggttttagtaaaagaaacataggttagggtacatgtgaatattcctgttagaaaaaggtgaaatcggggatgatttctttttctttttcagtttgtagatttgataatggaagagggcctttgcatttgtttttagatactttgttttagatacaaacatgtgtttgggactttttattagttttgaggcttgtgagacttaaatttccaccgtgtttctctacaataaagcattgctatgattaaaaatgaagatgcctttgttttttgacagagtatcaagaccaaaattacatggagcacttgatgggagaatttcaagtctaaatcatgggtagcagacagtggctgcaggctatttggctcccagtgtttaattttttttttcttcaatttgttgccaacattaagaaatctggacttttcacttagaaaaaaataataataaataacaggaaaaaaaaccaatcctgatgtcagttttccttgaaaatgcagacagtcgggcagcaaggccccttccagatcacgcctcctggtctactgccagcccctctctcagacctgcccagccctgtcttctcaaacatttgtttttcattttcttctgattttaatagcaatccatgttctttatagaaaatctggacaatctagaaaagtagaagaaaataaaataacctgttgttctacactctaagaataatcactattctcattttattttactttttattttatcttatttatttatttatttgagacagagtcttactctgttgcccaggctggactgcagtggcgtgatctcagctcactgaaacctccgccgcctgggttcaagtgattgtcctgcctcagccttccaagtagctgggattacaggcgcccgccaccatgcctggctaatttttttgtatttttagtagagatgcagtttcaccatgttagctaggctggtttcgaactcctcacctgaagtgatctgcccgcctcagcctcccaaagtgctgggattacaggtgtgagccactgcacccagccattattctcattttagacttttttttctaaattcgttctcttgtttgaaaattgtgtgtgtgtgtgtgtgtgtgtaaaccaaaccagactggggtcacacttctggggtctatttccttttttattttaacttgatgtagttaaatgtgagcattttttcatgtaattatttctgtgtggacattgtatgtttcattatgtgacatatcacatgtgttgtatttaacttttccccagtcatgggcgtagacagttggcagcttgtgcctgtcctaagtcatgacctcgtacatgaatcatatctggttattttcttacacttctagaagagaggttgctgggtcaaaggggatggacttacttaatgtttttgtgagtgacctcacaaaggctggacatagctcttgagtcccagggacaggctgagccccggcagtggcaggggtttgggggagcaggccctgcactgcatttgaggaagagccgtgcatgttgctcttggaggaggaggagcggggcggttagagggtctttaggtatctgtctaccttgaaaaagaaatcactcacctcttccagagcacgcccctcacccccgacctgagaggagaggctcgtggtttgcgatccctctccccattagggtctgtcaccctggggctgagtagtaggtatctatggcgggtgtcttcatggaagccctggccacgcatcttgaagtggctttcatcttgtcccttgcaacttaagcggaagatgcatcttggagagggtcggaggtacagttagaagcatgtgtggtacgtgaaagccggtggtcgtggggatacagagcggtctccagtctcgtctcctgtctcccatggccttgctttctgggccatagttgctgttgtagggggatactgtccgctgcccctactcaggctcccagcagccacctccttggcctttctgaagtctgtcacctaaggcaaagaggtcagagctggggactagagtcccacgtgggagtgtggcattgggactctgggaaaggcactgtcattcacaaggatgtgtggccatgtatttggcaaggttttcatatgggtgagacaaatcctctttgaatgggcagctatgggtggaaagaaactccgcaccagcaggaagcaggactggagtttgtattaacacagttccattcccaaaacataggctacagagactgagtttgaagtattaaaatcagttatgggatggaatgggagaaaatatttgcaaatcatctatctgacaagggacttgtatccagaatagataacgaactcttacaattcaacaattagaagacaaataacccaattaaaaaccacagctgggcacaagggatcacacctgtaatcccagcactttgggaggccaaggcaggaggattacttgagtctaggagttcaagaccagcctgggcaacaaggagagacccccaactctacaaagaaattaaaaataaaaataacagtagcagccaagcacagtggctcacgcttgtaatttcagcactttgggaggccgaggtgggcggatcacatgaggccaggagtttgagaccagcctgaccaacatagtaaaaccccgtttctactaaaaatataaaaattaaccaggcatgatggtgcatgcctgtaatcccagcacattgggaggccaaggcaggtggatcacttgaggtcaggagtttgagaccagcctggccaacatggtgacaccccatctctactaaaaatacaaaaattacctgggtgtggtggctcacacctgtagttccagctactcgggaggctgaggcacaagaatcacttgaacccaggaggtggaggttgctgtgagccaagattgcgctactgcactccagcctgggtgacagagcaaaactccatctcaaaaaaaaaaaaaaaaaaagcgggggggaactgtatggtacatataaattgtatctcaataaacctgcgttttgaacaaaagctctggggaaactattacacatgaaacagagaattctgtgaattgaaatccttttttccttcccagcaccgacagtaaatggttcacggccgacatcatgtccataggggtgaattgtacacagatcacagcaacagagtgtgacttcactgccgccagtccctcagcaggcttcccaatggatttcaatgtcactctacgccttcgagctgagctgggagcactccattctgcctgggtgacaatgccttggtttcaacactatcggaatggtaagagaacttgagtatagaacttcctttatactttccaggttttcttcacttgcggtatcgactccacacacctctgtcctgcctgtcaccctaaatgaccagcagacaaatgggtaggacagtcaaacccacactctgaccttggaggctgatgctaagggagtgtgatttgctaaaccaggggttggccaactacagcctgcaggccaaatcgggcccaccacttgtttttgtaaataaagttttattggaacacacagttacatccatcttttattgtgtctatgactgctttcacactacaatggtagagtagttgcaatagcagctgttgagcctgcaaagtctaaatttactgtggctctttactgaaaaagtttgccaacctcatgctagaagggatgctagcatatctctctgatcacccttacttattctggtgcaacttcttttgtgttgcagaataggcaccttgaatggtgcctggcatgtagtaggtattcagtaaatatttgttgaatgactgagtgaacaaatatgtccccagatattggaaggagacagaagaaccctcagattccagttcctacatttgttcctccagtaattcatttgtcacgtagtcagccatgccagatgtttcttccgtgtctggtttatgcacacacagggcatgaaacttacatggatcttgatttagacaaactaatgtataagacaattgaaatgtgatcaccgtctagatatttgatatataatgaacaattttattgttgacttattttcagtgttataatggtgttttggttatgatttttaaaggaggaggaggtctggttaagatgttaaagtttatgttatgtgtattttaccacaataaaaaattgggggaataaaaagagttcctgctgggcgcggtggctcacgcctataatcccagcactttgggaggccgaggcaggcagatcacttgaggtcaggagttcgagaccagcctggccaacatggtgaaaccccatctctactaaaaacacaaaaattagctggatgtggtggtgcatacctgtaatcccagctacttgggaagctgaggtaggagaatcgcttgaaccggggaggcagaggttgtggtgagctgagattgcaccattgcactccagcctgggcaacaagagtgaaactccatctcaaaaaaaaaaaaaaaaaaaaaaaaagcaaaataatccaaagaacaggagggacaaggacaaagcttccaggcatagaagaaacaaaattggccataagttgacagttgattcagttgggtaattagtacatgagtgtttgttaatgatcttccctctactttttttttttttttttttttgagacggagtctctctctcttgcccaggctggagtgcagtggcgcaatcttggctcactgcaagctccacctcccaggttcacgccattctcctgcctcagcctcccgagtagctgggactacaggcgcccgccaccacacccggctaattttttgtatttttagtagagatggggtttcaccatgttagccaggatggtcttgaactcctgaccttgtgatccgcccgcctcggcctcccaaagtgctgggattacaggcgtgagccaccgcacccagcctatcttctctctactttctatgtgtttgaaattttctgtaataaaaagtttttttttgttgttgttgtttttgaggtggagtcttgcactgtcgcccaggctggcgtgcagtggtgcagtctcggctcactgcaacctctgcctcctgggttcaagtgattctccctcccgggttcaagtgagcctcccaagtagctgggactacaggtgcacgccactatgcccgtctaattttttgtatttttagtagagacgggatttcaccatgttgtccaggctggcctctaactcctgacctcgtgatccgcccatctcagcctcccaaagtgctaggattacaggcgtgagagccaccgtgcccggccaataaaaagttttttagagaggatcatgcctgtaatcttagcccattgggaggctgaggtgggaggatcgcttgagctcaggagttcaagatgagcctggggaatatagcaagaccccatctctatttttttttttttttaatcagtggtttgtgctaggtactgtgagggacagaaacagagaagacagggcaatcctgccagctcctcgtctgctgtggacaagccatttgtccttgggtgccaaaccaccctccatttgagctataaagtgtcaaataagtgggaattaggagtatgcaaacaagtaatgatggctgggcgcagtggctcacccctgcaatcccagcactttgggaagctgaggcaggcagatcatctgtggtcaggagttcaagaccagtctggccaacatggtgaaaccccatctctactaaaaatacaaaagttagccgggtatgatggcacacgactgtaatcccagctacttggaaggctgaggcaggagaatctcttgaacctgggaggtggaggttgcagtgggccaagatgacaccattgcacatcagcctgggtgacagagcgaggctctgtcatttaaaaaaaaaaaggaatgatacttaccgccactgcccagggatcaagagaaggtaacagaagcaggatgtatcgtgacagtgggtccggtgccagccagctgccgcttccggccggagtcaagcacccatgtttctgttagttactggctgggctgctgttctctgccctcgtgcttgaaaagcttgacacagtggtggtctcatgtcacatctgccactttcacctctgctggtggcgttagaatcagtaatggatatggaggtggtttaccaagcagaggagtgagatggtggttggagggggcaggctttagcatcaccctcacctgggttcatatcccaactctgccatttattggctgtgttactgtgggcaagtagtgtcacctcctggcttccgtttcctcgtctgagaaatggggataaccttatttgtttttttgttttgttttgttttttgagacagtctcgctctgtcgcccaggctggagtgcagtggagcgatctcagttcactgcagcctccgcctccaggtttaagtgattctcgtgcctcagcctccccagtagctaggattactggcatgggccaccacaccccagttaattttggttttgtttttgtgagatggagtttcactcttgtcacccgggctggagtgcagtggcccgatctcggctcactgcaacctctgcctctcaggttcaagcgattctcctgcctcagcctcctgagtagctgggattactggcatgcaccaccatgccccaccatgcccagctaatttttgtatttttagtagaaacggcatttctccatgttggccagactggtcttgaactcctgacctcaagtgatctgcccacctcagcctcccaaagtgctgggattacaggtatgagccaccatgcccatcccgtgatacccttatttggcagtgacactgatcgtgagaggcttcgtggaaaggccatttacctggagactccacacattgtcgtccagtgttccctagagccagccttcctccagtgctgtgagaggaggcagattgttctcgcctctagatgaggtttactgggttcatgtcagattccgggccaggactctcttcagaagggcaggtctgagccctgtgttttcagccgtgcagtggccagctgtggctggtgtccacactcccatgtgctaatggagatgcccaaagaatgtgtccaaagccagtccctgcaggtgcttctgcaacgcacttctgcacactctgctcacttagctgggacaagggaagctggagaacgtgtgtgctggtgtccctgggcaggctgagtggaagagcattttgtcactagcagtcaatccacaaacatcactatggctggtggtgggccaggcctgacctcacttctgccactgggagttgtctggacttagcacctccaccagaacaaatgagggggcacaactacaaactcagcagttcttttgcacagagagaagcttggccagatcatacacctaaccctcaccaacctggagtgcccaggggagagaatccagccctgctgttgtgaacacacagtgacaggattgtctccttgtgtaaaatgtgcagacattggtctcttagaacttcgaggacccaaactgtactttgatctgagtttctctggtgaattatacaatgtgcatgcttacttaataaatgcttgataacccctcattgatagcacatcatgagtcacagtcctagcctgacctgtgaattatatgaaaagcctgaacaaatagacttacatggcaacacttctcagttattgtgtttaaatatagtatgggcatggtgctcacgcctgtaatcccagcactttgggaggccaaggcaggcggatcacctgaggtcaggagtttgaaaccagcctggccaacatagtgaaaccctgtctctactaaaaatacaaaaattagccgggtatggtggcgtgtgcctgtaatcccagctacatgagaggctgaggcaggagaatcgcttgaacctggaaggcggaggttgcagtgagttgagattgcaccactgcactccagcctgggtgatatgtgcgagattccatctcaaaaatgaataaataaataaataggccaggcgcggtggctcacacctgtaatctcagcactttgggaggctgaggtgggcggatcacgaggtcaggagttcgagaacagcctggccaacatgatgataccctgtttcttctaaaaatataaaaattagccaggcatggtggcacacgcctgttgtaatcccagctacttgagaggctgatgcaagagaattgcttgagcccgggaggtggaggttgcagtgagccgagatcgcacaactgcactctagcctgggcgacagagcaaaactgtctcgaaaaaataataataaataaagagatagataaaaacgtgtgtgtatatatctacacccactatatatatatatatacatatatatatagcattatataatacattgtattatatctataatacatatgtgtatgtgtgtggttttctctttgtaattctttttcagtgactgtcgggcctccagaaaacattgaggtgaccccaggagaaggctccctcatcatcaggttctcctctccctttgacatcgctgatacctccacggcctttttttgttattatgtccattactgggaaaaaggaggaatccaacaggcaagagcatctttcttttttgtttggattttcttttctttgcagtttctggcttagcaaaagaaagaaacctttaacatgggcaagaacagggtgtctccatgtccccgtgtccccatagaggctgagccctgagcctgttttcattgtcctcttcaagacctgtttttccactcggtttgctgagacctccctccgccaggctgatctgaagggccagccatcctttgatgtcactctgtgtcccttgtgtggggttgagactttgccggtgccctgcttacgatgcctttgccacgctctgtagtttggaggaggttttagtgggcctggttctccatgaggaatccacaactacagcctgcaaggcttaactgtataaatgtttgaacagtttgtgaaaagggcacatgcgaaatcggggggaaacagagggagaaagagctttccagagagcagtaccagcaggtatgagaaggcgtggcatacgtggagaactgcaggtgcttagattggtcagaaatgcaatccacaaggggctgtggcaggtgctcacgttgacagaggtgcatgacatcagagcggcctggtcagcctcggggagtataggaaaaagcatcatggtcttgaagcatctccagtgcctaaattatcctagctgcatttaaggaggttctgttatctatgggaacttcatgatttcctaaattcaacattatgatggtttttgataataagagcttacatttattgagagcttcctttgtgtttggctctgggccagaattttagatacttcatctcatttcatcttttttttttttttttttttgagctggagtttcgctcttgatgcccagctagtttttgtatttttagtagagacagggtttttaccacgttggtcaggctggtctcagactcctgacctcaggtgatctgcccaccttggccacccaaagtgctgggattacaggcatgagccaccgtgcccggcccatttcatctttatactaatccgtttgcagagagagaatccaagtcgttaagtggcttgcctcaggtcagcagcgaatcactggcagagcagagcagagcagagatgcctagcttcagagccctgctcttgaccaccatctttttctgccacacgctttgtatctgcacttctccttcattttttttttttttttaattattgttctttttttgagacagtctcactgtcgcccaggctagagtactgtggtaccatcttggctcactgcaacctctacctccccggctcaagcagtccacccacttcagccacccgagtagctggaactacaggcctgtgccaaccacacctggctaatatttttaaatttttttttatagagatggggttttgccatgttgcccaggctggtctcgaactcctggtctcaagcgatctgcccacctcagtctccaaaagtgctgaggttacaggcatgagcccgttcccagcctcctcttcatttcattatggggaatatgaaactgggaagagtgagactcactgaaaaacagacttagcatctaggaaatagggaaaaatcatttctccatatcagagctcaagatctgggtcgattagaatagagggagcctggcagaatccagaagagagactctgcctcttccaagtctgtcctctccaactggatacggtgccggaaatgcaagagataggatgggccctctggccacgcttttctccaccctttggttgctttcttcactcgagggcaccgtgttgccatgctccctccccaagggcccgcccatacttttgtttttttaggatggagtccatccacttctctgcactgagtcagcccccagagggcgagttgccacttgtatcctagagctgggcagggctgcccagcactggagaactcagctccaggaccctggggccagccttgttgagcagcaagctctaatgaagagcacacagaacaggcttccactgcctgggacccgcttagcaccatgtcacttagcctctctgggctgcagcttcctcgtgtataaaatgaaacaactgagctataagctggagcctgtgaagaggagcagccgtgagggcccccaagtccctttcctccatttgaccagagcatctgtacttggcttccatgatcaaaaggttcaaggatgaaaatgactctgaaagccaccaatgtgatctttgttccagctgtgagtctgtgtgttagggtccccaagacccaccctagatcgctcaaaggactcccaggactcagcacagagtcacactctgatttcgttttgagacagaatttcactctgtctcccagggtagagtgcagtgccacaatctcggctcacgggttcaagagattttcctgtctcagcctccacatctgtgcctggcccatactctgattttttatagcaaaaggatgcaaagcaaaatcggcaaagggaagaggcacatggaggaaagtccgcaggtgtccaggggtaggcttccaggagcccttcctgagctgagtcacgcaggatacacttcattgctccaccagcaagctgtgactgcacatgtgaactgttgtctgccagggaggcttatgagagacccagcgcccagggctttttctgggggctggccacatacgcaccctctgtgtagcgtatgccaaaattccgactcccagaaggaaaacagatgttcctcataaagaaaacacattgtgcaaacagtgtagggacggtaagccaccttaccagtttgggaatgggagggataaacttgaaatccaaattcccaggctgggcgcggtggcttacgcctgtaatcccagcactttgggaggccgaggcaggcagatcacttgaggtcaggggttcgagacaggcctggctagcatggtgaaaacccatctctactaaaaatacaaaaattagccaggcgtggtggtgggcacctgtgatcccagttactcaggaggctgaggcaggagaattgcttgaacctgggaggcagaggttgcagtgagtcgagatcacactactgcactccagcctgggcaacggagcaagactccgtctcaaaaaacaaacaaacaaaaaacgcacacaaattcccagatgtcagctaagggttgacctggaaatcaggcccttcaaagggcattagtgttaggcctgttacgttagctcttctgcagtctgtgactctaaattttaggaattccaattgaatgctgaaataaacccaaagggaatttttgtccttaaaatcgtgtcttcctctgccctggcagtccaacaccattaaacagaagaaaagaaaatgtaaaaccatcaagtaatactattattcatagatcatacaattacttttatatttttattttttaattttaatttttcagagacaatttcactctgtcacccaggctggagtgcagtggtgcagtcatagctcactgtagcctccaattcacaggctcaagccatcctcccactttggccttccgagtagctgggacttataggcatgcaccaccatgaccagcttatttttttattattattttctgtagagacggagggagggggtctcactatgttacccaagctcaaactcctggactcaagtgatcctcccacctcagcctcccaaagtgctggaattacaggcatgagccaccatgcctggcctatttttgtattttaaaaaataacaacatgttctgtatttgaataatctgccttttttcagttaacaatttagcagccttgtcttcccatgttttcaagcatatgttataccaccatttcatgtggctgtagtggattatattgtatctcaaaattagaaaacagttctttgcaagaaaccctatactgccataatagggtatcgctgttttccactttggtatgggacaatgacagccttgccaggacaacaggagccattgcctggaagaccaggtggggaggcagcaaggcctgctcaaggcagcagagggatgcgcagaggagacacagaaccttcctagagtctagggtccagttgtctcctgatgacataaatccttaaggtcattttagctgaaactataggaggctcaagcacatttcggtcaaactagaagcaggttgggaatgaaaggaacattatttcccagaataattttttctctgttgactaacttgaggtatctagattaaccgtgagatacaaaatgttggccaggcgcggtggctcacgcctataatcccagcactttgggaggccgaggcaggtggatcacctgagatcaggagctcgagaccagcctgggcaacatggtgaaaccctgtttctactaaaaatacaaaaatgagccagacatgatggtgggtgtctataatcccaactactcaggagttggaggcaggagaattgcttgaacctgggaggcggaggttgcagtgagccgaggtcgcaccattgcggtccagcctggtgacagagcgaaactccatctcaaaaaaaaaaagaaatacaaaatgtttgttttgagatggagtcttgctcttcatccaggctggcgcaatctcagctcactgcaccctctgcctcctggtccaagtgattctcctccctcagcctcccatgtagctgggattacaggtgtgtgccaccacatccagctaatttttgtacttttagtagagactgggttttgcaatgttggccaggctggtctcttaactcctgacctcaggtgatccacccaccctggcctcccaaagtggtgggattataggcgtgagccaccccatccagcccaaaatgttaaaggagaaaaagattatcctagaaattgggatttactgaagtctagttactacaatgggcactctgagacctcacagccagaaacacagttctaaagctatcagcctctttggccacacaacacaccaattttcacacataaaatgtgtccactgccagccagtgacccactaaaaatggcatcttgttcttctttggttgtcgtgttcacagtgaatttgaggaaacatcagaaaagatgtaggcagcttggccatgttcatttacatgtgtgcttgtgatgtttttaaaacaggtcaaaggccctttcagaagcaactccatttcattggataacttaaaaccctccagagtgtactgtttacaagtccaggcacaactgctttggaacaaaagtaacatctttagagtcgggcatttaagcaacatatcttgctacgaaacaatggcagatggtaaaatataccttcttatgtcctttctgaactgggaaaagaatactcctccaatagtgaaatcggggaatgcttatgaggtcatgggtggtgggagtggggagacccagtgagaagagtgctgaactgcaggaataatgagcttgtgctgagatttgcagtagtggaggctaccagacagctaccacttgctttatttcattacaggattgactttagctattaatgtaagcataccaggtgagggtggggggtagagggacttgcccattttactaggacaggaatgctctttaagcagcatggatggaacattaactgatgtttgtgttgtgcgtaggaagatcattctgttcactttcgtgtcctctttttagcctccactgagcttcagcaagtcatcctgatctccgtgggaacattttcgttgctgtcggtgctggcaggagcctgtttcttcctggtcctgaaatatagaggcctgattaaatactggtttcacactccaccaagcatcccattacagatagaagaggtacgtgtgcacacatctctttttttttttttgagacagggtcttgctctgttgcccaggcgggagtgtcatggtacaatctctgctcactgcagcctccatctcccaggttcaagcgattctcctgcctcagcctcctgagtagctggtattacaagtgctcaccaccatggcctgctaatttttgtatttttggtagaaacagggttttgctatgttggccagactggtctcaaactcctgacctcaagtgatccacccacctcagcctcccaaagtgctgggattacaggcgggagccactgcgcccggccacgcagacatcttaatggtgacacatcagggccccactgcccctggcaacccctaagagtgcagctgtgggcaaagccgtggacacagagatttgggttacaaatggtatggggttgtttgtacacccatgttcatgttgacacgattcacaacagccaaaaggtggaagcactccggtgtcgttgaaggattaatagataaatctttaatagatggtctttccatacaatggaatatcattcagccttagaaaggaaggggattgtgacacatcctaccacacacatggaccttgaggacattatgctgagtagagtagggcagtcacaaaaggatactgtctgcttccacttaaatgaggtccccagagtcatcaaatccataaagacaggaagtagaatggtggttgcggtggtggagggagggaagtgggaagttcgtgttgaatggggccagagtttcagttctggggctgtacagagttctggagatggatggtggtcatgattgcacaatgtgaatgtgcttggcactaccgaactgtacacctaaaaagagttatgatggtacattttatgttatgtgtattttaccacaatttaattttttttttttaatggcatggggttggctaaaaaggtggcctggcctggagattggctgcagtagacccctctccgaggcagcaggtctcctctgctgtctggagaatgctccagggaagtggcctggctggaggacgtgaaggcggtggagacagtgatcaggagcttgagctttggggcccacagggtgcttaggagggccctaaggcagagtcaacacccagagctgtgagtgccaggccccgtgtacccattgcccagtgggtattgctaatatttgaaaggacttgagaaagaacagtagcgtgggtcttgtggaaagtcttattttcctgcataaccccagccccctgaggctctgtgaggccattgggccttctgaggacacggtcaggacattttggggatcagaggcgagctgagagaagaacatttaaaaagcatttgcagccgggcgcagtgacccacacctgtaatcccaggacttggggaggccagggtgggcagatcacctgaggtcaggagttcgagaccagcctggccaacatggtgaaaccctgtctctaccaaaaatacaaaaattagccgggcgtggtggtgggcgcctgtaatcccagctacatgagaggctgaggcaggagaattgcttgaacccaggaggtggaagttacagtaagccaatatcgcaccatagcactttagcttgggtggcagagcaagactccatctcaaaaaaataaaataaataaaaagcatttgcttctggaggcttcacattattcttgggtaaacctagagtaaaggtgttggaagcagaatgttactcagttacatgtgggatgaacagaggttagataaggtccaagtctgcagaaacatagcagcactttcagaaagaaccctagtcacttgttccttcatctgccatgatgtattgtaggtacacaggcagtatacagattccctactagaacctccctggttaatattgtcacaaaatcacagctcctaacaggtctcagaatcttacttgcagtaataatctctctctctcctggtagaactaccagctgagccccagtacatgaatatactatgagtcattcctctgagacatgaacagaaaacacaggcctgtcagttcacttttctaggaaagcataaagaacatccgccaaaggtctctgagttacatgggaacagtgaatcatgtttcacttataattctggggtttcacaagggtacatgttttggttttgttcctctttcagtcagtcagctacaagcttattgtcttccagtatctttcagcatttccaagagctagacactagattcttggtaacttggtgaatctatggctaagcctaaagcctgcgggagcaaaagggaaattaatcgctgggaaacacccctttatatgttaaggcctaaggccctcgctcccagattctctgcttgctgtgcgctggtgcaaggggaggggtggaggagtgcctgagaccaatgcttgtgaacttgccctctttttccccatcacagctgaacaagagcccccagtccctccttcactgaaaggttacaattttagagacgtcttaagattaataacccacaggcctacactgagggttgcaaggaagaacttgcttttcttccaatcagaaaatcagaagaaaaaaacaaaacttgcttttcctgagttttgcccttttaaactctcagcatattaacatggtcagccctgggatgagtattaaagtgattactgagatgaggggtaaggagtattcaactattagaagttgttggctgggtgaggtggctcatgcctgtaatcccagcactttgagaggccgaggtgggtggatcatgaagtcaggagatcgagaccatcctggccaacagggtgaaaccctgtctctactaaaaatacaaaaattacccaggcatggtggcatgcgcctgtagtcccagctacttgggaggctgaggcaggagaatcacttgaacccaggaggcggaggctgcagtgagctgagatccacgccactgcactccagcctggcaacagagcaagactccgtctcaaaaaaaaaaaaaaaaaaaaaaaaattagccagccgtggtggtgcacgcctgcaatcctagctacttggttgggaagctgaggcaggagaattgcttgaacccaggaggcggaagttgcagtgagccgagatcgcgccactgcactccagcctgggcgaaaaagagactgactcaacaacaataaaaaattgttgccgggtgcagtggctcacacctgcaatcccagcactttgggaggccgaggcgggcggatcacctgaggtcaggagttcgagacagcctgaccaacatgggaaaccccgtctctacttaaaatacaaaattagcagggtgtggtggtgcatgcctgtaatcccagctacttgggaggctgaggcagaggttgcagtgagatgagatcgtgtcattgcactccagcctgggcaacaacgtgaaactccgtctcaaaaaaaaaaaattgtttcattgttgaataaaaagaaaaataagttatgtcattggtggacagaatcaacttatatctgaataaaataactataccaattaaaactaaagtaggccaggcgtagtggctcacgcctataatcccagcactttgggaggccaaggtgggtggatcatttgcgatcaggagtttgagaccagcgtggccaacatagtgaaaccctgtctctactaaaaatacaaaattagccaggcaaggtggtgggcacctgtagtcccagctacttggaggattgaggcaggagaatcgcttgaacctgggaagcagaggttgcagtgagctgagatcacaccactatactccagcctaggcaagagtaagactccatctcaaaaaaaaaataaaaataaaaataaaataaaaacaaaaactaaagttaaaaggtctggtatactgaactggtaaactaattacaattttgctttccaacctcctcaagtatttaaaagacccaactcagcccatcttagaggccttggacaaggacagctcaccaaaggatgacgtctgggactctgtgtccattatctcgtttccggaaaaggagcaagaagatgttctccaaacgctttgaaccaaagcatgggcctagcccactggctccctggaagagatcaagccatcggagctgctagagttctgtctggactttccagagaccagtattcccttttgctgcctctaaaaggcctgtccctgcagacatgagagacagcaggtctcatgggggtgacaagctttttttttttttcttaaagaattttcaaaatcaaattccagaatgattttacggagatatcccaggaaaattaaggcttctcttaaacactaaaaaggcatgtaattgcttgttagcaaaatggatatgacacatctctgatacttttttcattattggttgggctgagcagtcagaagacctggtcgtcgtcttgactttggcaaatgagccggagccccttgggcaggtcacacaacctgtcccagcgagggacaccgagtggcccttcatgtacatccatggtgtgctggcttaaaatgtaattaatcttgtaaatatactcctagtaatttaagattttgtttttaaactggaaataaaagattgtatagtgcatgttttttaaagtctatgtgaagtgttttctttattgtagcctattttctgcagagtttcagctttctaaaattactcaatctaaacttgttttttcttaaataacacctgctagagctactgaggcctcatgggaactcagcaaacacttcctatggatgtcacttgatcctccaaaggttataaagaaggccagggcctagtgcagtggcccacgcctataatcccagcactttgggaggctgaggtgggtggatcacttgaggccaggagttctagacccacctgggcaacatggtgaaaccctgtctctatgaaaaatgcaaaaattatccaggcatgatgacatgcacctgtagtcccagctacttgagaggctaaagtgggaggatgctttagcctgggaggcggaggttaccatgagccgaaatgatgccactgcactccagcgtgggaggcagagcgagaccctatctcaaaaaaaaaaaaaaaaagagggctgggcatggtggctcatgcctgtaatcccagcactttgggaggtcaagatgggaggatcgcttgaggccaggagtttgagaacagcctgggcaacatagtgagaccttgttttcacaaaaaataaaaaattagctagtcgtggtggtgcacacccgtagtcccagctactcaggaggctgagaccagaggatcatttgagcctaggagttaggagttcaaggctgcagtgagcaatgattacaccactacattccagccttggcaacagagcaagagaccctgtctcaaaaatataaaagttataagggggatttgcagaaggcacattagcacttcatttatatgtgacaagtcacactgtgttgaccaaggcagggatttgtgggcaataaagagaattaactgattaatcaatagtaatgttatctactgagcacgcaagtcatctgattgtgtcagtactgtcgggctctgttgttcaaaggatatgtatttaaaatccatttataggctgggcacggtggctcacacctgtaatcccagcactttgggaggccgaggcaggcagatcacctgaggtcaggagttcgagaccagcctggccaacatggtgaaagcctgtctccactaaaagcacaaaaattagctgagtgtggtggcaggcacctataatcccagctacatgggaggcagttggggccctgtactgctggtaagaaagtggctttttttttttcttttgagacagagtctcactctgtcgcccaggctggagcgcagtggcgcgatctcagctcgctgcaacctccacctcccaggttcaagcaattctcctgcctcagcctcccgaatagctgggattacaggcgtgcaccactatgcctggctaatttttgtatttttagtagagatggggtttcaccatgttggccaggctggtctcgaactcctgacctcatgatccacccaccttggtctcccaaagggttgagatcacaggcgtgagccaccgtgtccggcaaaagtggctaactctcttaagtgttgtgtaccatgctgtctgcagtggcaagagttagaaaaacaaggcccactcccaccccatgcacacaagtctccctgtgaagcatctgttgtatgcattaggtgcaccttaagtagacaagtttggaggaagaagttgtagataggagttgtaaagacttaccttagaccgttcaggaaatcggagacagaagagcttcttctgttgggcagcaggatggtggccagcgaggagtggaggatacatctatagcaggagaacaggaaagagtttcagcccagcaggacagagggcaaatcaactctgttagggtaagtgcatctgtgccaccccatttatttatttagagacacagtctcaccctgttgcccaggctggagcgcagtggcacaatctcacttcactgcaacctctgccttccgggttcaagcgatttttgtgcctcagcctccagagtagctgggattacagatgtgcgccaccacacccagctaatttttgtatttttagtagagatggggtttcactatgttggtcaggctggtctcaaactcctgacctcaggtgatccgctcacctcagcctcccaaagtgctgggattacaggtgtgagccactgtgcccagccttaaatagtattttctgaaatgaaatgcctcattctccttagtaaaataaatgactaattgatgggattagtatttacactgtcaaggccaggcgcagtggctcacacctgtaatccgagcactttgagaccctgaggtgggtggatcatgaggtcaggagtttgagacaagcctggtcaacatggcgaaaacctgtttctattaaaaatacaaaaattagctgggcgtggtggctcacacctgtaatcccagctacttgggaagctgaggcaggagaatcacttgagcccgagaagcggaggttgcagtgagctgacatggcacctctgcactccagcctgggcaacagagcaagactctgtctcaagaaaaataaagtcaagctaagtacattgtcaaaatttttgagttggaagcactcttataaataatccgttgacagggcataatccataacctacttgccaaatcagcccattccctgtttttgtaaaacccgtgtgctaagaatagcttttacatcttggaatagttaaagtcaaaagaagaatatttcatcacacatgaaaattctatgatattcaaatttcactgttcataaatatttattagaacccagaaggtaagctgcgtgtagtggttcacacctgtaatcccagcactttgggaggctgaggtgggcggatcatttgaggccaggagtttgagaccagcctgaccaacatggtgaaacaccgtctctactaaaaatacaaaaattagctgggcatggtggtgcatgcctgtaatcccagctactcaggaggctgagcgaagggaattgcttgaacctgggatgcagaggttgcagtgagcagagatcgtgccactgcatgcctggtgacagagcgagactctgtctcaaaaataataataaaataggccgggtgcgggggctcacgcttgtaatcccagaactttgggaggctgaggcaggagggatcatgaggtcaggagtttgagaccagcctgaccaacatggtgaaaccccgtccctactaaaaatacaaagattagctgggcgtggtgatgtgtgcctgtaatcccagctactcaggaggctgaggcaggagaatcacttgaacctgggaggcagaggttgcagtgagccaagattgcaccactgcactccacctgggcgacagagcaagactctgtctcaaaaaataataataaaataaaataacgtctctgtccatagtgtttaaatcacataaaatggacttctggcagggcacggcggctcacacctgtaatcccagcattttgggaggctcaggtgagcggatcgcctgaggtcaggagttcaagatcagtctggccaacaaggtgacaccctgtctctactaaaaatacaaaaatcagcccagcgcagtggcaggtgcctgtaatcacagctattcaggaggctgaggcaggagaatcggttgaacccacaaggtggaagttgcagtgagcccagatgacaccactgcacctcaacctgggcaacagagcaagaatctgtctcaaaaaaaaaaaggacttcttggtacataacatttaaagaagcctgcatagtcactatggccactatgtctttgaagtgccacaacagagagaggctctctgaaaggaaatgatactgatttgggaatagggtattacaaggggaacacgtgtgccagagtaaactatgtacatatttaggaaggtgaaggaaaacaaaggttcttaaaggaaaaaatgaggattagatcactgttttaagataattatccttggctataaggatcaatagcaagggggatgccattccaaggttagacaggcagttgttgggcagatgtcctcatagaagtgtttgttgtgtaaggcggtgaagggctttgtgcaaggttgagatttttgcagtcttttgtgatcatttttatttatttatttatttagagacagagtcttgctctgtcacccaagctggagggcagtgatgcaatcacagctcactgcaacgtctgcctcctggattcaagaaattctcctgtctcagcctccttagtagctgggactacaggcatccgccaccatgcctggctaattttttgtatttttagtagagatgggattttgccatgttgcccaggctggtcttgaactcctgacctcaagtgatccacctgcctcaaccttctaaaatgctgggattacaggcatgagccaccacgcccggccttgtgatcatttttgttatcaagcatttttgcatgagaatccttcatggccttccccagctctatttgtcagggttttttatttgtttgcttgtttgtttgaagcacaagtgactccattttgattctgacaacttccacactatgcagtcacatctctgaggcgcccagagcccttcaaaatatatttgctgtttgccaaatagtctctatttgagatgagaacatccccagctgtccttctgtttgatgagaagtgagactccaccccagcagcttccggagatgcagtcatgcctccccacccttcactgccactcccagcctcccttgagactcaaggactgtcccacgggaatgaagtgaaagtgacgtctttctccttgtttccagtctgtggtgagggaaaacagctggctacgcttgagagggtatggaaactggtcagagtggttacttgggacctggggcctcagagccacccgttgctaaggagaggactctggtcagggcaacttgccaatgctctaggaatgacacctagacattcctaaaaaatgatagcctaaaaattcatcccattgtagaaatacaggcagcactagcttctctgggcccctcagttatcaaaaaaagaggagggaggcagaccctcagggttactttacatccatatacctagctacaacataaacatcaaatgatatgtggccaggcgcgctggctcatgcctgtaatcccagcactttgggaggcagaggcaggcagatcacttgaggtcaggagttcgacaccagcctggccaacatggagaaaccccgtctctactaaaaatacaaaaattagccaggcatgatggtgcatgcctgtagttccagctactcagtaggttaaggcatgagaatcgcttgaacctgggaggcggaggttgcagtgagcaagatcgtgccactgcactccagcctgggctaacagagagagactctgtctcaaaaaaaaaaacaaaacaaatcaaaacaaaaagcacaacatatgatattaatgattttccttgaaattaaatagtggtatgagtaacaatgtataataactgtaaatattaattcaactcgtttcatttctacattcaggtgaataaaaatatctgatctattctctgtgggtaataagagtatttttgtatctgaaaagcctaagagagggtcaaacccttaaagagctggtaagtccaggtaggaggaccctgaggtccttggagatgggcaggtacaaaattttgcctggcataaaattcaattaatcaatcaaactaatgtgtttcttgactatttactttctgaaattttcctgtgacccttaatacaactgtgagtaccttcaagtgtcctccagatccagacacttctcaagtggccagccccatgctaactactaaaatagtggagcaccagtagtcggggctgtgggtacattcctgtaggctgtgcaccgcacaaccccacaggtgctgttgacctaaacagaacacaaaggcacacagcaactgctagtagtcctgatacgtaagccactcaagttccaaatgcctagtcacagaagacaaagactgaagaaccattccaaatattagagacactgcagggatatgacgactaaatgcaacgtgtgaccatgggcaggatcctgccacagaaaaatagtatttttctttactataaagtacattacaggggtaatctgaagaatttgaataaggcacaaagtactgtatcaatgttaattttctgactttggcatcgtatcgcagtgatgtttggggggaaatatacacaggattcaagggtaagtaaacaggcgtcacatctgcagcatgctgccaaacatttaaaataacagaccaaagcaaatgtagtaaaatgttaacttctgggaatctgaaaggttatacaggaattctttgtggtttttttttgtttgtttgtttgtttttttacagagtttcgctctgtcgcccaggctggagtgcaatggcggggtcttggctcactgcaacttccgcctcctgggttcaagcgattctcctgcctcagcctcccaagtagctgggattataggcacctgccactacgcctggctaatttttgtatttttagtagagatgggatttcaccatgttggccaagctggtcttgaactcctgacctccggtgatccgcccaccttggcctcccaaagcactgagatataggcgtgagcaccatgcctggcctctttgtgctatttttataactctcctggtaagtctgatgtaatttcaacataaaaagttaatctcaggctgggcgcagtggctcacgcctgtaatcctagcactttgggaagttgaggtgagcagaccgcttgagctcaggagctccagaccaatctgggcaacatggtgaaaccgtgtctctacaaaaaatacaattagccaggcatggtggcgtgcgtctgtagtccaagctactcaggagactgaggagagaggatctcttgagcctaggaggcagaggttgcagtgagccgagctcacaccactgcactccagcctgggtgacagagccagaccctgtctcaaaaaaaaaaaaggttaatttctaaactcacaacttccatggtgggagggaagtacactgatcacactgaataatgtttttggcaccaggagtagaaactgttggagcacagacctgtactatagtcccagctactcgggaggctgaggctggagggtcacttgagctcaagagttccaggtcgaagtgtgcaatgttcatgcctgtgaaagccactgtactccagcctgggtaaaatagtgagactccatctctttacaaaaaaaaaaaaaaaaagaaagaaaaagaaacaaaagaaactgctggctgggtgcagtggttcatacctgtaatcccagcactttaggaggctgaggtaggcagatcctttgagcccaggagttcgagaccagcctgggtaacatggtgaaaccccatctctacaaaacattaacaattagccaggatgtagtggcatgcacctgagctacttggaaggctgaggtgggaggatcgcttgagcctgggaggtggagggtgacagagtgagacccagtctcaaaaaaaaaaaaaaaaaaccagaaactgctgctggaaaagagcacaatttacatcctttttggagagctctctggttttatgtctagacctctggggtggggaagaggtcaacatgctccccaaatcaaagacccagcactctctacactggcataatccatgagggtctaggcagcctgtcctgccatacttactcaaagaaatttaaaatatcctatctgccacagctgaaagaattgaagaggcatttactgctatccaaaaccctaagtaaaattacttaagctgtgataaaagtgctacaaaaaaatgctctggcaggctctaaacttggaagtcttgtttttcttagcatggcatgccaccttgtggcaaaaagctaaaaagtcatcagatgagaaaggaaacatcccttcaaaagtcatcataagaaatgccgggcacggcgcctgtaattccctgcactttgggaggccaaggctggcggatcgcttgaggttagaagttcgagaccagcctggccaacatggcaaaaccccatctctactaaaaatacaaaaacaattagccaggcgtggtggcatgtgcctacaatcccagttacttgggaggccaaggcacgagaatggcttgaacccaggaggctgaggctgcagtgagccactgcactccagcctggatgacagagtgagactctgtctcaaaaaaaaaaggaaaaaaaaagcctacttgtgtgaatcacttattatttccaggaactttgttaagcatttcctcagattaattctcaaacatacttacagacagggaaacagtcttgcagtcaaatagctaataaatggcagtgccagaataagggaataagggagaagtaaaccaacctaaacttaaatccataggcctccgagaatcccagcgcccaaaccacaactgtctagtaacaacgcaattggaagaattcttcctactgtgccctcctgccaccatttttattccccataatcaggctggccacaggcttttcccaaagccagccatgcccacacctaaacattttcctctccttttgttaattccctgtgttctatctattctaaagccaccatagcagcactttccccaaattacatttttcttttattttttttattttttattttttatttttttttgagacagtcttgctctgttgcccacactggagtacagtggcttgatctgagctcactgcagcctctgcctcctgggctcaagcaattctcctgcctcagcatcccaagtagctgggattacaggcatgtaccaccatacttggctaattttttgtatttttagtagagatgggtttcactatgttggccaggctgatctcgaactcctgacctcaagtaatctgcccgcctcggactcccaaagtactgggagtacaggcgagagccgctgtgcctggccccaaattacatttttcaacatgttccaggagataaatttccaagtctcagtaatagaaaacaccatataattgacaccctcctcctaaagacatacaatacacacacacacacacacacaaaaaaaaaaaaaaaaaaaaaaacctctaagaaagaaaagaactttacagaattttaaaaaggtgttttggagcctagtgtggtgatttgcacctctagtcccagctactcaggaggctgaggcaggaggatcacttgagctcaggaattcaagaccagcctgggcaacatagcaagacccctctctaaaaaagactaagcaagaaggcggggcgcagtgctcacgcctgtaatcccaacactttgggaggccgaggcgggtggatcacctggggtcaggaatttgagaccagcttggccaatatggtgaaaccatgtctctactaaaaatacaaaaattagccgggtaggatggtacccacctgtaaccccagctactcgggaggctgaggcacgagaaccatttgaacctgggagacagaggttgcagtgagctgagattgcaccactacactccagcctgggtgacaagagcaaaactccatctgaaaaaaaaaaaaaaaatcaagaaataaagaaagaaaaaacatgtttagacctagttcagcccagggtttcccaagcttctttgacacacacaccttttctcaggtacaccttcagggccaccagtgttctaaaagcaacttgggaaaggtgcaactaaatctaaaaaggagagctgagtgtggtggtgcacacctatagtagactgaggggaggactgcttgagccaaggagttcaaggcagtagtgagctataatcacaccacggcgttccagcctgggcaagagtaagacactgtaaaaaggactccataaaaaagaacaatgaaaacaaagactcctgagttgatgttgtgactgaaaacccttccactggggaaaaatgtagagatcatgagttcaatgcacccatgtcaaaccctctgggggctcttgctcaaggggccaaattatatggtttgatatcatcaatctttcagtcttccaatttcattatgttgatgcaaatcaatgtcaagtcaacgtcttgtgtatagaaatacacacacacacacacacacacacacacacacacacacatatatatatatactggaaaaatacagcctctgggtttttactcagtggcaacagcacaaggaatacaaggatcttagagcaataaaatggaatactctgataatattggtccacacacaaaaaacactcagattcaatgaccactgaatctatgtgacagcttgagaaccttagtaagggaatcacatgcatttgtagatgattaccaaagattctgccctaactcataatatttctaagagtggatactaacattatctcttttatgtttttatttattttttattttctagacggagtctcgctttgtcacccaagctggagtgcagttgcacgatcttggctcactgcaacctctgcctcccgggttcaagcaattctccctgcctcagcctcccgagtagctgggattacaggggtgcaccaccacgcctggctaatttgttgtatttttagtacagaccgggtttcagtatgttggccaggctggtctcgaactcctgacctcatgatctgcccgcctcggcctcccaaagtgctgggattacaggcgtgagcccccacgcctgaccacattatctctttttttaaaatgaagaaacagaaaattaagtgatttgctcacaactaaaaaacaaattcagggttgggtgtggtggctcatgcctgtcaacctagcactttgtgaggttgaggcaggtggatgtgttgagaccagttcacccagaacagcatagtgagacccccgtctctacaaaaaacaacttttttttttaatgacatggagtcttgctctgttgcccagactggagtgcagtggcacgattttggctcactgcaagctctgcctccaaggttcacgccattctcttgcctcagcctcccaagtagctgggactacaggtgacccccaccacgcccggctaatttttttgtatttttagtacagacagggtttcaccatgttagccaggatggtctcgatctcctgacctcgtgatccgcccacctaggcctcccaaaacatttttttttaattaaccagacataatgacacgtacctgtggtcccagctgcttggaaagcggaggtaagaggattgcctgagctccagcatttgaaggtgcagtgagctgtggttgcaccactgcactccagcctaggcaacagagtgagatattgtctttaaaaaaaaaaaaaaaaattcatggcagagtcagaaatagaaaaaaacagccaccatttccagtcagtcttcagggaaaccttcaataaccctcacataagcattttacaagtctatttcttcttattttataaacataactgcatctttaattgggtatacttgaataattgaaaactgaacagcaaatcaatttttatggttcattttctccaacaaacaacaatattaaactgtatgagaagtaatatttattgcaacaggttatgaggtggaaacaaataattagtcttacaatttgctagaagcatgacagagcttactaacattttgaagaaaaaacagcaaagaaagaagtcatcaaacaagatggtatcttgacaaaggcacagcgctccacaactgcttcatactctgtgcacaagaaatcctctcaagagagaggagaggagtgatgccaaatgggcttacattagagccgtggacactaccactggtattattcatacaaccaaggctctacaacacccctctggagaaaaagtgcaacacaaaatctgtgtaacaaaggaaagcaaaagtagcaataagggcccagaggaatacaaacagtgcaaatacagtactgcaaactcagtaaaaggagtttttgattggagtatgaactttcaagttgaagatatatttcacaggaatattcacccaaagcttgagagctagagcgaggagagacttgcagtcggtaactgagtagatgaaatgcataatttttcactaggtgataattccctttgggaagaagtgctttatctttaattattccactttttgttaaatggttcatgcttttaaactgcgattgtctcaaacttgcttgctattgaattgtgtaacatcagataatggcaagttgtcaaaagataaccccagtggatatttgaagctgcttttacgagaagcatggtgctgagctgccttacacagtctttttacagtaaccataaaaaactgagtttatttgatcatgtattatcccttctcacataaagtcatattagaggaattctttttaaaagaagctttcaaactagtcctttgggcatttaaaaaatcattatataaaagtacacttcttcaatacataagaacaaatattttttctttaccaaaaaaacctcatttttaggccaaaataagttacaacttgctgaaaaccttttatggctcagtgctcattctagatatatgaagctatatttttttgtacatcttcagaaatcagatactgagagtggtccttcttttttttgagagggagtttcactttctcccccaggctagagtgcagtggcgcaaactcagctcactacaacctctgccccccgggttcaagcgattctcctgcctcagcctcctaggtagttgggattacaggcacccaccaccatgcctggctaatttttgtatttttagtagatggggtttcgccatgttggccaggctggtctcaaacacttgacctcaagcaatcggcccgcctcggcctcccaaagtgctgggattacaggcatgagccaccgtgcccagccagagagacaagagtggttacttctaaaatgacaagatgatgtaaccctggctcagggagtagatcaagttctaaatctcaggaataaaaaactgatactcattatccaattcatatagtcttgtattatatacatattaacagtctatgcaatgaaaaataaagaaatttcataaaactatttcaaaactcagaacataaaaatgtaaagaaacaaaacatttaatgtacaatctactccatttggcaatgtgtactgagagataaaaaacctatctacaaacagaatataacaaaaggaaaatgtgacttaagaagtgatctcaggtccatagctcttcggttcttccaaatttgtagatcagagtgctagaaagataggaaaacaaatcatgaggaaaaaaccgatggaacaagcaacacagaattcattttctcaatatgctttgacaggtacttcactgattcctatcaattttaaaaattaaattagacatcatggcagtgttggtcttaatttgcttattttgtaaagcagtctgttaactacgatggctaagcataactgtattctttcttaaggcctgggaagttattaacaggcaacttgtaaggaaaagagacatttctctatgactcagaaacaaaaaaatgaatcaataaatcaaaagaaaaagggagagagaccattctcatagtgacaggcattagggccattttatgtctccaggagcctaccatatctaaattacagtaactgaagcaccctacaacagaccatgctgcaattcttcattccttcaacaaataattattgtgcactgaaaagtggctacgtaccaagcacctaagtgctggggtgagactgagtccagacaaacttgctccctaatggagctaagggtctaataaggagacaatcaaataaatataaaattccacctataaaaaaatgctataaatgagaggtgcacagtatcctcagagtgaaacataaggatcagacctagttagagaggtcaggaaaggttttcctgaggagtggtgactgaattgagatccaaaagaagagggggaattatctcggcaaagtgagagaggataaggaggcgggagcagagagatgggacactccagggccatgagttgagctgtgggcatactaaatgttttggatttgaaatgtcagcaacccaagaagggatgtgaagtaggaatctggatatacggtttaggcctggaaagggacatctgtgactcactggcatataagcaataattggagtcctaagtacacatgagttcacccagggacagaaaaataacaaggagtttcttaaggccaagaacagctttaagagacttcaaaaggtagtaggcagggagtggaggatcagcttgcaaggaaaacagaggagtgaccagagatgtaaataaaagaggttgtaccccagagcttagaacaggtccagcacacaggaagcatacaggctgcctgataacttgccagcctctgggcagagcacatagatgacacagctgtcaactatgtccacctgagcatacaaggtttctgttcatccaattgtcatttaagtggattcatctaccaccacaaagtgttgaatctgaacttaatctctaaagactgcctaaaatgtcttcataacaacttaccatatccccagaaggctgtcagtcacatgtctttgacatataagacagcagaaactgccaaacatctttcaaaaccaggagtgtcaaggccacaaggcgaaatccaggtagagcatggtggtctgagagtggagggagaccacatggctagagtttgccatgcagcgtacagacagccacacagagggaacgcaggagatctgcagggggtgctccttcagtctgtggctgagtactgaagagtctatacataagaggaaactacccaagggaaggaaagaaccactggaaagaacatgtcccagagctaccacaaggctggaagagagttcatactctcacaagtcgagtagagaaacctcggaatacatgaagcatcagagagtggaaacactcaaagggtatgactgccttagtagggggacaaatcagtcctgggctacagctgctctggtcctgcctataacaaagcttaagagacataaaaggatcaaattgtttctgattgtttctgagtcacctaactgcatcccaaaacaaagcttaaaaacatttaaaggactagcaaagatccagtcccaacaaattgtatgcaaagcaccaaataagggaaaataggtccaaaatgaagagtaaacagaagcagaaaaaatcagtagaagcagatgcagaaatgacacagacaattggacaaggaccctgagatagctataaatatactctgtgtgttcaaggtggaagagggcatgagcatgttaagggaagacatcagaaatatttttaaagacccaatcaagcttctagagagagaaaatacaatgtctgagatgaaaaaatcattggatggcatagattagacattgcagaagtagagattaatttatttaattcttcaaagtgacaatagagagattaattttatttatttatgtatttatttattttgagatgaagtctcgctctgttgctcagcaatggtgtgatctcagctcactgcaacctcagcctcccgggttcaagtgattctctggcctcagccttccgagtagctgggattccaggcatgcaccaccatgcccagctaatgtctgtatttttagtagagatgaggtttcaccatgttggccaggctggtctcgaactcctgacctcaagtgatccacccgccttggcctcccaaagtgttgagattacaggtgtgagccaccatgcccagccgagattaattttaaaatgtaacaatagaaactatccaaactgaaacacaaacaggaaaaaaaaatctgaccattagcaagctgtgagacaacttcgagcagcctattataacctgtaattgaaatcccagagggagggtgcagtggatacaaaaaatgcttgaagaaataatggctgagaagaatctagatttattgatgaactataaacctatagatccaagaaactcaatatacaccaagcagaaggaatatcaagaaaactagaccacagtacatcgtaatcaaattacttaaaaccagtgacaaaagcaaagtttttcaaggcttagaagttacttaatgatttatgggggatggggacagaggcagataaaattttataaatatatacctaaatatcctatgttgacattaaaagacattcattctaggctgggcatggtggctcacacctgtaatcctaccactttgggaggctgaggtgggcagatcacttgaggtcaggagttcgagaccggcctggtcaacatggcaaaaccccatctctactaaaaatacaaaaattagctgggtgtggcagtgcatgcctgtaatcccagctacttgggaggctgaggcacggaattgcttgagcctgggaggcagaggttgcattgagctgagattgcaccactgcacatcagcctgggcaacagagcgagaatccagctcaaaaaaaaaaaaaaaaaagacattcattctaaaaagcatagaatggacttcattttggggatattttagaagactgcccctaaaaaatacttttaatattggtttatttttccacttactttaacttttcttaaaagggcattcagaaaacagaatttcccaacaggttttgtatataatatgcatactatgtattaattattattattattttgatatggagtcttgctctgtcacccaagctgaaatgcagtggcactatctcgactcactccaacccccgtgtctcctgggttcaagtggttctcctgcctcagccttccgagtagctgggattacaggcacacaccaccatgcccgactaatgtttgtatttttattagagatggggtttcaccatgttggccaggctggtctcgaacccctgacctcagatgatccacccacttcagcctcccaaagtgctgggattacagacatgagccaccacacctggctggccactaggtattaattctggtttttccttttttcttcataaaggtactttacctgttgttgttaattttttttttcccgaaaggctagtcaagtgaaacaatgggtctgatagggttttttaataagacacaggctatggaagcagcagtctggattcaaatccaggcttctcatttactagctaggcatcctaaagcaagccctaaactttatttcctcatctataaaatgggaataacactgggtgtggtggctataatcccagcactttgggaggccgaggcaggcaaattgtctgagctcaggagttcgagaccactctgggcaatatggtgaaacctcgtctctactaaaatacaaaaaattagctgggtgtggtggtgtgcacctgtagtcccacctactcgggaggctgaggcatgggaatcgcctgagtcccgaggcggaggctgcagtgagccgagattgttccactgcactaaggcagcttgggctacagggtgagactccctcgcaaaaaataaataaataaataaaaataaaaataaataaaatgggaataacacctgacatatatttaaaataattaaatgcattattttattttattttggtctcactctattgcccaggctggagtacagtggtgcagccttgcctcactgcagcctcaacctcctcggctcaagcaatcctcccacctcagcctcttgagtagctggcactgtacaccaccacaaccagataatttttatatttttttatagagacagggttttgccatgttgcccaggctggtcttaaactcctagacttaagcaatccacccacttcagcctcccaaagtgctgggattacaggcatgagccacagcacttggcctaaatgtgaattcaaagggtaaaatatataaaggatccagctaaagtcttgatacacagcaagacctctagttaaaaggcctctctgctcttatgtaacagtggaattctcaccttttaaaagaagttctatcattgtaaccaatccatgggatttatatgtgttccatatatatgctgccttaattaagttgacatttctgtaaatgttacaggcgtggttaaaaaataaggcaacttacctaaaaaatataagtgcattttgaaaaaacacagctagtcccggataaacatcagtatctacatacacaaagtaaaacagattagacggttatataggcaaacggcagtaataaagtatcagtgccattcataatgatacattttgtatattacaacatactgctattattcattaactgtaagacatctataatgaaactgaaagaagaaaatgccaatttaattcccccaaagcaaaggactgctcttactctggataaaagtcaatgaacttacaaagttttcttttagtcaaagtaattgctggttctagctacatcaaaactgctgaggaagcagtaacttgctcctttgcctcctatggccaacactgaaatgcaaaatcgtaaaaacatacaaaataaattcttgacttttaaacagtctgttaatttattttctttcatgaattcaagaggttttttgtgtttgtttttaaagaaatggggcctcactatattgcccagactggagtgcagcagctactgacaggcacaatcatagcaaactacagcccaaactcctgggctcaagtgatcctcctgcctcagcgtcccaagtggatgggactacaggcacacaccacaatgcctggctctcaatccaggagttttatcatgcaaatatgtcagatataaataacacagttagaatttatcattctctttcactgaatctatcctggaggaaatggttactatctttataggaaaagaaaagaaacaaaatggaaactacttaaatttttgtggattattaacttttgtaaaactacaaatgttgatttaaaaaatactggagaagatgaagaaactggttcaattctgagctcttgatatcatagcaaacaatacagcagcatggttaagagctccaagtttgagccagacccaggtttgaatcctatctataccaatgactaactgtatgaccttgggcaaattatttaacctcagcatatcttcatttcctcacctgtaaaacgggcattgtaatagcacctactccagagtgtaagaattagatgagtgactctatatagtgcttagaacagtatctagcctataaagtaatatataaaagttagctattactatgaatattaatagttcaagcaaatctgtacagtaaaagatttgaaacatggcctagaaatgctctctgaaataaagtcatattcactttacaaatagaaaagtatatttaggctgggtgtggtgactcacgcttgtaatcccagcactttggggggccgaggcgggtagatcacttgaggtcaggagtttgagaccagcctggccaacatggggaaaccctgtctctactaaaaatacaaaattagccaagtgtggtggtggatggctgtaatcccagctacttgggagattgagacaggagaatcacttgaacccaggaggcagaggttgccgtgggccaagactataccactgcactctagcctggacgacagggcgaaactccatcttaaaaaaaaaagaaaagtatatttaaatgagtaatgctgttgaaatagaaagatgaaattcacaatcaagaaatttatcaatatttactagttctttaaatattaagatacaattggctgggagcggtggttcatgcctgtaatcccaacactttgggaggccaaggtgggtagatcgtctgagatcaggacttcaagaccagcttggccaacatggtgaaaccctgtctctactaaaaatacaaaaaattagctgggagtcgtggcaggcggctataatcccagctattcgggaagctgaggcaggagaatcgcttgaacccgggaggcagaggttgcagtgagccgagactgtgccattgcactccagcctgggcgacaagagtgaaactccaactcaaaaaaaaaaaaaaaaatacactcaacaatagtaaagcctttacaaacaatatttccctacataccttacagaaatggcaatttatccctattttcactatagaaactgtaaagctcatggatcacttcaactgctaaagtaaataagcaggaagccattaacctgaggctatctccctactctgagttcctgtgtgaccccaacccaccccccggaacctaacttacgtaaacgaactgaaacctagggttatattttttaataaatagctgaattttagtcaatcacaaacggctaagctttagccaatcccaagcagccaactgatgagaccatgcacaaataagacaaacatatagctacagacaatctaaaaatttcttgtctttgccttgtgttcagcctacagctgctcatgctgctgggtgaagctctccgaacctcttcttggtttgctcaaattgctaatttatctaaagtttttctttaacataactatggagaccttttaagaaaatcagtgacagcagcccacccttcttacagtcagggataaaatgagtttaaaacacactttccggctgggcacagtggctcacgcctgtaataccagcactttgggaggctgaggtgggtggatcacctgaggtcaggaattcgagaccagcctgaccaatatggtgaaaccccatctctactaaaaatacaaaaattatctgggcgtggtggcatgcacctgcagtcccagctacttaggaggctgagaaaggagaattgcttgaacctgggaggcagaggttgcagtgagccgagatcacgccactgcactccagcctgggcgacagagcaaggttctgtctcaaaaaaacactttcctataagattccatgtgtatgaaatagatacagacagaaagtacattagtggctgcctagggctaggggaaggagtaatggggagtgactgctaatgggtatggcagtgataaaaatattctcaaattggattgtgatgatggtagcataattctgtgaaaatactaaaaacactgaactgcatattttaaatggctgaattatatggtatgcaaattatatctcaatgaagctatctttaaaaaagcattttccttcagatatgcttcataccagaattatgtgctctagtagtatttttaattaactaaaaaacacattttagatacagttggtgaccaatgttatttaagccaaccactgtcctcttgtaatctgacttattttgtatcaagtgaaagacaaaagaaaaacaaaagtattccaaagatcttatactgatcaaactatgagacttaaatgatactatcaaaagtattcaaaaaccagctgtgagtcaggacaaggagatgtgacagttaagcaaagaaggctgacaaagagattccagaggtagaggagtcagaggatgaataaattgcgttctctgaaactgactcctgtcttaggagcaaaggaagagggccagtgaaacagtcttccgacgcttccagagacatttctgaaactgggttctatttttcatcactactgtgaatgaaaagctatggcacctggcagagccacagatttcagcatggtgtaataagagctcatcccactccatcagctgtttctgtatgaagagtatacatatgtgttcagtcttgcccttaaaaaactccccctgtacccatgacttaaaaattacaggattggctgggcatggtggctcacacctgtaatcccagcactttgggagaccaagatgggtggatcacttgaggtcaggagtttgagaccagcctggccaacatggtgaaaccctgtctctactaaaaaaatacaaaaattagctgggtgtggtggcgtgcacctgtaatcccagctacttgggaggctgagacaggcaaattacttgaacctgtgaggcggaggttgcagtgagccgagatcacaccactgcactccatcctgggtgacagagtgagactccgtctcaaaaaaaaaaaaaaaaattacaggattaggttggagagagaaggtgtcaatgaaacgaaagattatctactggcaatccatagattatcagataaggggtctataccccttatctgaaatccctggggcaagatatattttgggattcagaattcttcaggtttaagaacagtaagggaaagcacatatactacatagcaccgccagctgggtatagacaagcacatcctataatctaatatatctattttcattcctacaataaaacatttgaatacttacactaaatgggataaagaaaatagtgagctccatgtcagtttaggtcaggttttgctgccagactagttataaataacttgattttcagcattttgtggattttagaattgtatataagggagtgtacacctgtactggtttctcactttttctactgcaactcccagtaaatgggcctctagcataaaatcctggctgtctaaggtaaagaaggaaagcagaaagtctggagacagctgagaggtaccagctttgtcagtggcttggatttcctaaccagggctatcctactgcactaagtgttcccactgacaagttttattaaactcatgtatcttcacacagagcagtatcttcaatctaagtgaacaattatactaagttgtactcaaggtagagtaagccaaatataaaagacatatctgaatctctcctataaaatacaagaagaatatatacttactttgggtaacatatgcaccaaaaagaatccacatggaagcaataagtgacccaaacatcaacatgaaaccaatgaaaagccaaactcgagcacctgtgtagagaagaggctttatgattttgttcatttttgcagctctgtaacgtcttaggaatacataatactaggagccctgttagcctagtatatattatgcatatcaaagatagtcatatatttatataaatctgctgtaagttaaatgaatgatgatttaaaaaaaaaacactaaaagaagttaaaccatacatggaaaaggaaaaaaagaaagttacctttttactgactagagaaacgaatgccctaattaaaaaattacactgttgtatatattaccaaaataattgctctattaaaagtagcacatgtattctggatagccatcaccacataggaatgagagacttcaaatgaagaaggactaatatgtccctttttaatcaatggtaagcttctataatcacaccattattcaatatggtacaaataacggccattctttaggagtatattcaggcttttttattgctgaggcagccaatctgtaccacatattcatgaaaacttcaagatcagaagtatctcttcaaccctgtattgaacaaaattctagatctcgataatgtaaatcatctggacacttgagtagattcaacatatttttaggaaagcaggttaatacttgcaccagatcctgttcacaggtatactgacagccccatcaacctctggaaggggaagaaagctccactgaagtaaaaataaaatcctagccaatttccataacagaaaactaaatttgcctcagttgcaaatattttgttaccagggaaaagattcattttagacaccagataaggaagaagcactgatcaaagttcataatggttagaacagctgatatctgagagaaataggtctctatattatctaaattttattacaatactaagcagatctccagaaataaacagtaatgtttagttctttggagaaatacaatctctaaattatattcaatcatagcttttatctaacgtgaataaaaggaactattaaaaatccttaaaggcggggcatggtagctcacacctgtaatcctagaaatttgggaggccaaggtgggctaattgcctgagctcaggagttcgagaccagcctgggcaacatggtaaaaccctatctctactaaaagaaaaaaaaatcagtcgggcttggtggcgggtgcctgtagtcccagctattcaagaggctgaggcaagagaattgcttgaacctgagaggcagaggttgcagtgagccaagatcatgccactacactctagcctgcgcaacaaagcaaaactgtttcaaaaaaaaaaaaatccttacaattattttccatcatgtcctttatttatggctatatacattaaactttctaatagaattaaacaagaaaaaaatttctcttgtaaagtaagtatgtctgagggcatattaacaaaaagagaaaaaaaagaaaaagaagtatgcttttgtttagcaaaaaaataaaactgtaacattttctcttgtttgctttggctacaaggaagctctgagttaaggttaatgaacaattaaaagcatccatcttgtcccaggttctaagtacaatgatcatttttctacctagttcctgttcttttttatagttttattatttagctgtttcatttatagtatatttattattttgatactttcctattaattcctccgggaactaaatagagatagtttacagataaaccacttaagcagtacaaaagcttaagagtagcaatacctgggcatgactataagacagtttgtccttaatttttgaaacactaaacagaaattgcactatatgcacaatataaaaatataaactgtactgttaattttaatagaatagggaatatcatagaataaaatataataatcacttagggtaaaaacgacgggcttgggaaccagacagaccaaagacaaatacaggttccacttttaagctaaaaaactttggataagttacagtgaaacttcctataaaaaacagataatagtggccaggcacagtggcttacaccggtaatcccagctactctggaggctgagaggggaggattgcttgagcccaggagttcaaggcttttctgcgtcatgatcatgccactgcactctagcctgggagacagagcaagacctcgtctcaaaaaaagataatagtaacataattcacagcaatgtccgtggaatattcttgaaagaaaaatgatggagtacattattgtatgctctacatacaacatcttcacttgctaatatatattttttctttaccttccctcattcctgacattactgctgaggctgacatacaggatatgatgaaaagtaagcgcgatcgcatgcgcatacacacacatattgtgcactttaaacttaggctcatctgtcatttgtcattataccctctcgcaaattctccatggattccagtagaagtgaggttacaaaatctacatcagcatttaaagcatcaggtagaaggctgggcatggtggttcatgcctgtaatcccagcactttgggaggccaaggcgggtgcatcacctgaggtcaggagtttgagaacagcctggccaacatggtgaaacccagtttctaccaaaaatacaaaaactagccaggcgtggtggcaggcacctgtaatcccagctactcaggaggctgaggcagaagaattgcttgagcctgggaggcggaggatgcaatgagctgagatcgcaccactgtactccagtctgggtgacagagcgagactccgtctcaaacaaaataaatacaaaatttaaaaaataaaacatcaagtagaaaagaaagctaagctcttcaaagctgctttatttggtttaaaaggctatgatacttactatatgatcccatttatatgaaatcatagaaaaggcaaagcaaccatcatagaaagtagatcagtagtggccacgaggtgaggggaagagtattaactataaaaaggggtatgagggaactttttggggcaatggaaatgttctgtatcatgattgtagtggtagttacacaactgtaactgtacacatttgatcaagctcatcaaattgtacactttaaattggtggattctggccaggcgtggtggctcatgcctgcaatcccagcactttgggaggctgatagcttgaggccaggtggatagcttgaggccaggagatcaagaccagcctgaacaacgtggtaaaaccctgtctctacaaaaaataaataaattagctgggcacagcagcatgtgcctataatcacagctacttgagaaactgaggcaggaggatcactcgagcccaggctgttgaggctgcagtgagccaagatcatgccactgcactccagcctgggtggcagagtgagactccgtctcaaaaaaaattaataaaataataaatacattagtgaattttattatacttaaattatattcaattaagctgacaaaaagaaaaaatatacacgtgataccaaaccagacaaagtgaccaaatggttctagatgggaaacaagcacagcatagtggctaaaagcatgggctctggagccagactgtccatgttcaatcctggctccaccacttacttgctctgtgactttggacacattatgtaagcccactgtaccttaatttcttcatattataatgtaaattttttttttttttttgagacggagtttcactcttgttgcccaggctggagtccaatgaggtgatctcggctcaccgcaacctctgcctcccgggttcaagcgattctcttgcctcagcctcccaagtagctgggactacagaagtgtgtcaccacgcctggctaattttgtatattttttagtagagacggggtttctccatgttggcagggctggtctcgaactcctgaccttaggtgttccacccgtctcagcctcccaaagtgctgggattacaggcgtgagccactgcgcccggccgtaaatgtttaaaaaacacaattgggccgggctcggtggctcactcctgtaatcccagcactttgggaggccaaggtgggtggatcacctgaggtcgggagttcgagaccagcgtgatcaacatggagaaaccccatctctactaaaacttcaaaattagccaagcatggtggcgcatgcctgaaatcccagctctcgggagggtgaggcaggagaattgcttgaacccagggggtggaggttgtggtgagccaaaaacccaccactgcactccagcctgggaaagaagagctaaactccgtctcaaaaaaaaaaaaaaaaaaaacaaaaattggataacaattcaaatgaattcaaactataaaaactaatttatgtgtagacaaatagcatctttctactgaacaattttgttgcagtctgtaggtggctactcaggtgatcagaagtgaatgtaaagacactgtagtcctaggtttgatcccctaatgtgttcattactttcctgttaataatcatagtcagccatcttgtaagtaacattattggtcaacaattgggataataataaatccatcattagcactggagtccaagatccatttgaatagcaacattttttatctatatcatgggcagtgtaacatgacaaaaacagtaacttctagcaataacttactttcttaaggatttgaataacactaaaactttgttttaaagcaaataaaaaatattctatataatcattaccagtcttgaataaagactcacaagagaggctttttttctggtgacaaatttctgttttgtcaacacccattaacagctcaaagtatctttacctgttcttcctaaacagccgctttcatagctatcacctctcacctgagcattggatacagcatttatcctagaacggcacaaaatcatcaaatgaatttcagtattcgctgttaaaatactcaaatatttatataacacttagacggaaaacagattatttcataactaaaatcagtatctgaataatttaacatatttttaacctaataaaaatgctagttgatagaaatgttacattagtcttattttcataaagtacacccagaaaacacatttattttaagagatttctatcacttctctccagagattatacaagagggaccagttttctggattctttgtctatttcacatttatacatgaatgactcagtgctatcccacttcaaggttctcattattatcaagagttaaacagtttctctttgtgttaaaagtcaagtgattttctatgatccatttcttaagctcagagaaaatgtagcttatgtataatatgcccactttattcagcttccccttccatttttgttagagcaaggtacattaattagtaacaggaatttcctttttttagaagccacaatggatataagtagttccattttccaaaatataacctttttaaaactcctggccaggtgcagtggctcacacctgtaatcccagcactttgagagtccacagcaggcaaatcacgaggtcaggagttcaagaccagcctggcaaacatggtggaaccccgtctctactaaaaatacaaaaaattagctgggcgtagtggcaggcacctgtaatcccagctacttgggaggctgaggcaagggaatcacttgaacccgggaggcagaggttgcagtgagccaagatcacaccagtgtggtccagcccaaacaacagagtaagactctgtctcaaaaacaaaaaaacctcctgatggtataaggaaatgatgtaatcttaatgtttaatattttttaattgttaaaagacatccataaaaagcttccaagcttttttatgaaatgaggtaacataaacttaaaaataatttaataaaaacaaaagccacaaacaaatctcttttgaggccaatcttgccttttcctcaaacactggcaaacacagtcaagtagcacattaaaaaaaataaaaataatactgcaaggtaaaagttgagtgtactacaacacctacgggtgatttactactaaaaaaatgcagaaacgtaacatgtttcatgaaatctcagagccatcagttttaagatacaccattaatttttaatactgacaagaaataaaaatgttatcaattataattctaagataccactgactgtaagatgcatcctgatattcagaggtattaaaatgcgaaaaagtagatcttgcaactgacaaaatatgtaactgaccagatttaaaaatatgaggaaaaaaaaaaatcacaagataattgttataggtgctaaaaagatatatgaccaaatccaacactcattcttggttaaaaaaaatcgtaataaaatgggaattatgtatgtatcatgttaaaaaatagtctatcaaataaattaaaaagttattcaagaaagcactgcacattaacaggaaagtatttttagaaaaatcaccttgaatagagaattatcttcatacttacatgaagaaagccaatgtggaaaatacaccacatgtgtgaaaggcatggttcaactgttctggcttaggatacaccacagctgcatcaatcattatccaccagcctgtaaaaaacttaaaacacagcccaagtcactgaaacattaaaactcttgctagcacaatacctgctttttaacattccttttgtcctacagatcatataaatgggctgggtacagaggctcacgcctgtaatcccagcactttgggaggccaaggcaggtggattacttgaggtcaggagttcaagcctggtcatcatggtaaaacctcatctcttctaaaaatacaaggccgggcgcagtgctgacatctgtaatcccagcactttgggaggccaacacgcgcaaatcacctgaggtcaggagtttgagaccagtctggtcaacatggtgaaacctcgtttctactaaaagtacaaaaattagctgggcatggtggcaggcacctgtaatcccagctacttgggaggctgaagcaggagaatcgcttaaacccaggaggtggaggctgcaatgagctgagatcacgccactgcactccagcctggacgaaagaacgagactctgtctcaaaaacattcaaatataaatacaaaaattagctgggcatggtggcatgtgcctctaatcctagctacttgggaggctgaggcacaagaattgcttgaacctgggaagtcagaggcggagactgcagtgagcagactgcttcacaattatcgttagttcttgctctgcttcatttcattttgtttttctattggactttaggtgtagaactgtacattgaaagagatgaatttttaaaatgtaaacagataaagaaatttgcttccaaaaaatgctgtgggagccaggaatggtagtatgaacctgtagtcccagctacctgggagactgaggcaggaagattgcttgagaccatgaatttgaagctgtagtatactacgaccacatctgtaaatagcaactgtactctagtagctgtacaacatagcaagacctcgtctctttaaaaaaaaaaaaaaaagtgcggacagagagtggttgatggaattataaaccaagataggtcctgattttggggtgttttttttttaagctggatgatagacacatgggataaaggaggtgatggaatctttataccattctctctgcttttgttttatgcctgtcattttcaattaaagttaaaaaatgatggaaagaaaattaaacaatagtttccttcacaaatctcttcctctgatgctcccctgatgttgcagctggggaaacagagatggtatttcttccctagagccgctgcagggcttcagttccaatggagcctaaggttgttactattatctgcagagtactgtcactgttgtctgaccttcaataagtcacaacaataattttgggttacatcaaattctgagcctttaaggatcttaaagtacttacatatatgttgtatcagtaagttaaaaatgctattgcctataataattatattatcactggaactgaagaaaagatattaagtacacatttacaaagtcaaaatgaatccagggcctaccatattctgcttggcaatagtatctagaactctgataatcatctatacaaaacagcagtgaaataaatagttctggaaagccattctcagttcaaaggaaccggcattaatttccagggcaaaaggtaagggatacatgtcaccaaccagtctttctcacttaccaatatacctgcgacaacagatgccacagcatttcttctctcactccagtcaatacattcacattctggccaacgaaaattatctaggaagcctgccatttttacttcttaagcataaatttttcattaaatgctgtatcctacaaacagaaagacaaaaactaatcaacctaagaaaatgttttctaaaagtaaaataccttactcctttcttaaagctttacacacaactttactttaggtcctattctactatagttaagaaaaattcaatacttcaacaagtacctaattgagatgtatataggactacgctaggacccaagggggagcttgctatttgataaatgagcactatggttttaaaccatgtctaggagctaggtgccgaggtggttcacgcctgtaattccagcactttgggaggccaaagtgggcagatcacttgaggccaggagttcgagaccagcctggccaatattatgaaaccttgtctctactaaaaatacaaaaaattaactgggcgtggtggcacatgcctgtaatcacagctactcgggaggctgaggaacaagaattgcttgaacctggaaggcagagattgcagtgcaagattatgccactgcactccagcctgggcaacagagcaagactctgtccaaaaataaataaataaatgaaataaattaaacatatctaaaatatttgacacttcttccattgagaggtagatttatgtcctacctttgaatttgggtcaacaataaagactagtagaccagtagagtagaggaagtgatgctatgtaacttctccatgccacttccaagatcaggtcacagaaggcaatggagcatctgcctggttctctggaacactaatgcttgggctaccatgctgtaaggagaccatttataggtgttctgacccacagttacagttgaggtcccagctaacagctagtattaactgccagacatgagtaaagacacttttaggtaactgctatccagctatagcaccatcccaaaagtttgagccttcccaggtaaggcaccagatatatggagcagagatacatcatcctggctatgccccttccaaattcctgacccataaaatctaataaacataataaaatgactgttttaagccacagggttttggcattaatctgtaacgcagtaagacataactggaagaaggagaaaaatcatgtgcctaaataactataggagtgtagcatactatttttaaaaacaaagatattatgtaaacatgaaatgtttcaaggccaccataaattctagaaagaaataaaaaaaaaattgaaagcactggacagggctgaaaaacaggcagaaattgaaagaaacttcatccttgaaagaaagaaaacacagccagatgcgtggtggctcacgcctataatcccagcacttcaggaggccgaggcgggtggatcatttgaggtcacgagttcatgaccagcctggccaacatggtgaaatcccgtctctactaaaaatacaaaaatctgaggcaggagaatcgcttgaacccgggaggcgaaggttgcagtaagccaagattgtgccactgcactctagcctgggagacaaagcgagactgtgtctcaaaaaaaaaaaaaaaaaaaaaaatcggctaggctcggtggcttacgcctgtaatcccagcactttgggaggccaaggcaggcggatcacgaagtcaggagatagagaccatcctggctaacatggtgaaaccccgtctgtactaaaaatacaaaaaaaaaaaattagctgggcatgatggcaggcgcctgtagtcccagctactcgggaggctgaggcaggagaatggcatgaacccgggaggcggggcttgcagtgagccactgccctccagcctgggcaacagagaaagactccatctcaaaaaagaaaaaaaatcagccaatcatggtagcatgcacctgtaatcccagctactcaggaggccgaaataggagaatcatttgatcccaggaggcagaggttggggtgagccaagatcacaccactgcactccagcctgggcaacagagtgagactccctctcaaagaaaaaaaaagaaagaaaacacagtaagtgggatcagctgttccccttaggaaccccattaaactcccattcccagcccagggagtccccttggcacaaagtggccacagtggcagcaaaaagccacagtcttcttggcttgagatgccagaagatgggagttcaggaccaccataacagctggaaattgaagggggacatctcggaaaggagtaagtcacaaagagagccccaaacactttaaaataagggagacattttggaattttcattccaccaagtcagggaggatcagtaaacaccttggggacatatcctaacaaaatataaaaccaagtctccacaatttcaaggtgatcagccaatattttaactgcctgttacaataaaaagcaatacttttcagatgaagataacaaaattgactcatattattcacaacgtccaatatatactaaaaaaaaatcactagacatgcaaagaaccaggaaaatgtgatctatttttaaggaggaaaaagaacagtcaatagaaataaatcccaaaatgactcagatattgaaattagcagacaaagactttaaagcacccattataaaaatcatattcaaggacttacaggaaaacatggtcaaaataactgaaccaatggagaatcttagtagagaaaaggaaactattttttaaaaaaagaatcaggagccaatgtgatggcttgcacctgtaatcccagctactcagaaggtcgaggcaggaagattgcttgaggccaggacttcaagcccagcccaggcaacatagcaagaccctgtctctaaaaaataaattaaaatgtaaaaagattcaaatgaaaattctaggggctgggcgcagtggctcatgcctgtaatcccagcactttgggaggccgaggcaggcggatcacgaggtcaggagatcgagaccatcctgactaacatggtgaaaccccgtctctactaaaaatacaaaaaattagccaggcatggtggcaggcgcctgtagtcccagctactcaggaggctgaggcagaatggcgagaacccgggaggtagagcttgcagtgagccgagatggcaccactgcactccagcctgggcaacagagcgagactcccctaaaaaaaaaaaaaaagaaagaaagaaaattctagaactgcaaattacaatgtttgaatttaaaaattaaatgggccgggcaggatggctcacacatgtaatcccagcactttgggaggccaaggcggggggatcacgaggtcaagagatcgagaccatcctggccaacatggtgaaaccccgtctccactaaaaatacaaaaacttagctgggcatggtagcaggcacctgtaatcctagctactcaggaggctaaggcagtagaattgcctgaacccaggaggcggaggttgcagtgagccgagattgcaccactgcactccagtcaggcaacagagcaagattccatctaaaaaataaataaataaataattaactaaatgaacttaatcgcagattagatacagtagaagaaaaggacagtaaacttaaacatcaaaagaaattatccaatttagagacctgaggaacaatactaagtggtctaaaatatatgtaattaaagttcccagaagaagaaaagacagaataagaaataaaaaaattttgaaaaaaataatagatgggctgggcacggtggctcacacctgcaatcccagcactttgggaggctgaggcgggtggatcacctgaggtcaggagttcgagaccagcctggccaacatggtgaaaccccgtcactactaaaaatacaaaactgggtgtgatggcacatgcctgtaatcccagctacttgggaggctgaggcaggaggatcacttgaacctgggaggcggaggttgcagtgagccaagatcacaccattcattgcatttcagcctgggaaacaagaacaaaactccatctcaaaaaaaaaaaagaataaatgaaaatttctcaaatttggtgaaaaatattaacttataaatccaaaaagctcagcaaactccaaggaggataaatacaaagaaaacatcataatcaaactgctgaaaaccagagatacagagaaactcttgaaacagtcttatggggaaaaaaatcaatacaacatatacagagacagaacaataggaatgatggctcacttctaaccagaacaaaggatactagaagacacaggaatgacactgttaataacgctttaagacaaaaaaaatcaggccaggtgtggtggctcatgcctgtaatcccaacactttggagactgaggtgggcagactgctttgaggccaggagttcaagaccagcctgggcaacatggagaaaccccatctctaataaaaatacaaaaattatctgggcatggtggcccttacctgtagacccagctactcaggaggctgaggcacaggaatcacttgaacccaggagctggaggttgcagtgagctgagatcgcaccactgcactccagcctgggcaaaaaagtgagactctgtctcggaagaaaaaaaaaaaaaaaaaaaaactcaatcccaaattctatacccagcaaaaatattctccaaaaatgaggatagccaagcatggtggtgtgcacttgtagtctcagctactcaggaggctgagatgcaaggatcacttgtgcccagaagttcgaggttacagtgagctatgacaggtgacacagtgagaccttgtctcaaaaaaaaaaaaaaacaagaaggtgacagcaattctactcctatctaactacccaagagaaatgaaaatatatcttcacaataacttgttcatagcagcattattcgtaattgccacggagtggaagcaaccaaacatacatcaacgaatggataaataaaacatagcacatccatacaacgaaatacaaattcagcaacaaaaaggaaagaggttcctactgatagatgctacatgaacgaacctcaacaactgactaagtaaaagacagaagaccatatattgtgtgattccatttacaagaaacatccagaataggcaaatctatagacataaagcggattagtggctgtctagggatggggagaagaaagatacaaagtgactgcaaaaggctacaagattctaaaactagattgtggcaatgactgcacagctccgtaaatactaaaaatcattcgactgtacacttaaaacaggtgaatgttacagtatatatactgtatctcaacaaagctgtgttttttggggggcaggggagggggttgttgttgttttttttaagagagacagggtttcacccagttgtccaagctggtcttaaactcctgaactcaagcgatctgcctgcctcagcctcccaaaatgctgagattacaggtgtgcaccaccattcccagccagttttcttttttttaataagagtaaaataatggtacttccaggtaaacaaaaattgagataattcatcaccaaacctgcgctaagaaagaaatgctaaagggaattcttcaagctgaaaggaatgatacccgatgaaactgagacctacaagaaaaactgaagaggccaggtgcaatggctaacacttgtaatcccagcactttgggaggccaaggtgggtggattacctgaggtcaggagttcgacaccagcctggtgaaaccctgtctctactaaaaatacaaaaccaagctgggcgtggtggtggatgcctgtaatcccacctattcaggaggctgaggcaggagaatcgcttggacccgggaggcagaggttgcagtgagccaagatcgtgccattgcactccagcctgggcaacaggagtgaaactccgtcaccaaaaaaaaaaaaaataaaaataaaaataaataaataaataaaataaaataaaataaaaataaataaaataaaaaagcaagagaaagataaacacaaacaaatcaggacagaggctacctctggaagaaaaaaatgcaaacattttgttcccccaccgccaccacccccaagacagagtctctctctgtcacccaggatggagtgcagtggcgtgatctgagctcactgcaacctccacctcccaggttcaagcaattctcctgcctcagcctcccaagtagcggagattacaggtgcccaccaccacgaccggctaatttttatatttttggtagagacagggtttcacatgttggccaggctggtctccaacgcccagtcttcagtgatctgcctgtctcagcctcccaagatgctggcattacaggtgttgagccactgcggctggccaaacattttgtttcttaatctggtagtggatacaaaatgatcattgcaatagtattctttaaattatacatgttttatatgcttttttgtacctgagataaaatttgcaatgaaagaaattattactatttttttttgggagatggagtctcgctctgtcgcccaggctggagtgcagtggcacgatcttggctcactgtaactcccgcctcctggattcaagcagttatctgcccccacctcccaagtagctgggattacaggggcccatcaccaggcccggctacttttttgtatttttagtagagacagggtttcaccatcttggccaggctggtcttgaactcctgacctcgtgatccacccgccttggcctcccaaagtgctgggaatacaggcgtgagccaccgcgcccaggaagaaattacttttaaaaaagaacaagcagctgggtgcggtggcttactcctgtaatcccagcactttgggaggccaaggtgggcagatcatgaggtcaggagaacaagacaatcctggctaacacgttgaaaccccatctctaataaaaatacaaaaaatcagctgggcgtggtggcacgcacctgtagtcccagctactcgggaggctgaggcaggagaatcacttaaacccaggaggtggaggttgcagtgagccaagatctcaccactgcactccggcctgggcagcagagccccctctaatctgaaggacctctcttatcacttctgccaacccaattaaatgaggcaatataaccttaaggtcaacaccacttcgtggtaagaagagtaataaatcctctattatttaatacagtcttcaaaattttctgttccagcctctaaatataaaagaatatatagagccaggcacagtggctcatgcctgtaaacccaagactttgggaggcctaggtgggtggatcccctgagatcgggagttcaagaccagcctgacaaaagcccgtctctactaagaatacaaaattagccgaggtggtggcgcatgtctgtaatcccagctactcaggaggctgaggcaggagaattgcttgaacctgggagatggaggttgcagtgagccaagatcacgccattgcactccagcttgggcaacaagagcaaaactccgtctcaaaaaataataaaagaatatatggaatcttagaaatgcatttaattcaaatagatttagctactgcttttaaattataaaatcttttaagttataacatcaggcgtggtggctcacacctgtaatccctgcactttgggaagccgaggccagcggatcacgaggtcaggagattgagaccatcctggctaaaacgatgaaaccccgtctctactaaaaacacaaaaaattagctgggcgtggtggagggtgcctgtagtcccagcttctcgggaggctgaggcaggagaatggtgtgaacccgggaggtggagcttgcagtgagccgagatcgcaccactgcactccagcctgggcgacagagtgagactccatctcaaaaaaaaaaaaaaaaaaacaactttaagtttaaaaagattccttgtgaaataaaattatatcaaagtacaatcatctgtttatattatctacttgaaacttaccctagaacgacaaaaagattttcataaagcaaagcttttaatggctaaaacccagaaacagtcaaaatgtccatcaataaggaaccaaaaaatgtatattagggtacatccaaacaacggtataccatgcaacattctgaaaatgaggcaagttggctgggcaggatggctcacacctgtaatcccagcactttgagaggctgaggcaggtggatggcttgagttcaggaattcaagaccagcctgggcaatatgagaaacccgtctctacaaaaattacaaaaattaggcatggtggcactcgcctatagtctcagcttctcaggaggctgaggtgggaggatcgtttgagcccaaggctgcagcaagccgtgagggaaccactgcactccagcctgggcaacacagtgagacccggtctccaaagtgaggggtggggttgggaggaaatgaggtaggtctccacgtgcttatgaaggaaatgtgtccttatattatcatcagttgccgagcaatattataatataataccctcctagggaatggaattgaggatgtaaagagtgaacaaacaaggaattctaacttgacatacctctgcgctgtctgaattttacttgatattcttctgtcatgtttaaatgttttaaacaacctgaatgttactttaatcatttaaaaagtaaaacgggctaggtacggtggctcacgtctgtaatcccagcactttgggaggccgaggcgggggggggttacctgaggtcaggagttcgagtctctactaaaaatacaaaaattagctgggcgtggcggcgggcgcctgtaatcccagtttacttgggaggctgagacaggagaatcgtttaaacctgggaggcggaggttgcagtgagccacgatagcgccattgcactccagcctgggcaacaagagcaaaactcggcctcaaaaattatatatatatatacataagttaaaaataaactttaggccgggcacagtggctcacgcctgtaatcccagcactttgggaggctgaggcaggtggatcacgaggtcaggagatcgagaccatcctggctaacacggtgaaaacccgtctttactaaaaatacaaaaaattagccgggcgtggtggtgggcgcctgtagtcccaactactagggaggctgaggcaggagaatggcgtgaacccaggacgtggagcttgcagtgagccgagatcttgccactgcactccagcctgggagacagagcaagactctgtctcaaaaaataaataaataaataaatttaaaaataataataatacactttaaaaggccaggcgcggtgcccacacctgtaatcccagtactttcagagaccgaggcaagcggatcacttgaggtcaggagttcaagaccagcctggccaacatggtgaaactctctctctactaagaatataaaaattagccaggcatggtggcaggcgcctgtgatcccagctactcgggaggctgaggctgtaaaatccctttaaccctagaggtgcaggctgcagtgagcagagatcgggccactgtacttgtagcctggtcaacgagggagactctgtctcaaaaaaaacagaaaaggaaaatgaggataaaatacgataaattctttaccttggcccccagaagtgaattcagaattcagaaaagactagccagtgtaaggctgctgtaaccctagttgacagagaggagggattggggtggtgagtgggaaggctgtgtctccggaagaagaaatatacgtccccacctcactctaattaaacctgcttttccagcgcgataaatattcaagataacttttggtttgcatttcaataacaaagtcttgcaccactatcttcagtttaaaaaaaaagtttaatgtttgctctacgtttgaaatgcatgcaggtttaaaagacaagaaacaaaatgatgaaaaagtgtgaccggcctgagagttcagagcctctgaagtgtcaagggatccacagtgcaggtaggatgaagagtctgagaagggagatgggatcctccgaaaagagaaaatcgggtcttacagcgcgatgtaagacgatgcggatgccacttccctcccaccccgtcccgtccgaggcctccgccccctgcccctccgcaccccccgacccaggcacgcgcagcggggagcagcccagcctagcccgtctcactgctttggttttgaaaggtcacgtatttaccttagaatttcagcaccttccaacttactgttttaagtacctttaaccagcctattggctaaaaaccgaaacggtcctacccgcgactaccactgctccagtgacaatgctctgctgctacttatttaacggagctcaaggtttataattctcgaaagaatgttgttccccttccctttcccctcccgcctctgtacttgactctcgtaagaatgaaatcagaaaagtgcagaaaacacaggctcctagcaatggttcggggcaaacgggaggggcgaagaagggctggagccgccccggggccctcgctccggcctcgggagggcgtcgcggccgcagcagggcgtcccgaaaaccgtcgcctccgtgcccgccgcgcgagaaggtgaaaggcacgagatggagcctctccagccctccccaggaacgcaacctgacggcgtgacagcgcggcagggcagcctccccgggctgcttgcgggtcgcggcggcgccacggtcacggtcggcccgaagggacgcgggcaggggcaagaaggggcggcgggggctccgcgggcccgagtctgcaggccggcgccgaacgcagggaaaacccggctggacggccccacagcccccagaaggccgggccggacagggcccgacgagggagcctccttacgcgcgggcggcgggcgcgagccctctacggttgcctggcgccggagacccacagacaggactcacccagcttcctcaaacgcccacgccgacttcaggcgcgcgcgcaggaaggagactgctgcgccacaaccctgccggcgtcccgcggctccacctcagccccgggagcccggagctgggagcagacgcgaggatagagcgccggtgaggcggggcgaggcgccgtgtgcaccgcagcgaccaatcggagcgcagcaagtggccggccgggggcggggcgggacgcgagggggcggggagagggcgttggctgggcgcagcgggacgccgggcgctcctcgcgaccaatcggcgtgcagcaagtggccggccgggggcagggcgagctccgagggacggggtgggctgctctgcaggcctcccggagccggagttcagacccagctatctacggttccgggcagagcgggacgggcctctcctgtcccctgccggtgggcggccgccgccgggctcccactgctgcgtttctgcacgctgacttgaagtgcagtaccgtgagattacgtgcggacggagctcgagacccgggggaccagggtttcccttcgcctatggccgatcagtcttgtctgtctgcgagctgcccagagtagggaaggtgctccgggagggttctcgggaacggagggtctttagagatgcctttttctaatcccctcaattcagaaatggagccccagaaagttgaagttagtaaaccagggctacccagcgagtgctggttacccgaggtgatcctcacaatacaactagtcttctgatttcgctcggcgctctcccgtctattcacgtagatttttgtctttttttttttttttcgtctttcttatagtcagatatctttcagcctcttggattttcaacataactttaacagcgtttggaagccccgtctaaatttcctacagaaatgcctataaccatttagttgtttgggggaaagtcgagctttgttttttgggtggtttgtttgtttgttttgagacagggtcttgctctgttgtccagggtggagtgcagtggtgtgatcttggctcactgcagcctcttacctcccacgctcaatcaatcctcccacctcagccttccgagtagctgggattacaggtgcgcaccaccatgcttggctaatttgtgtatttttagtagagacgggatttcacctggctgatcctgaactcctgacctcaggtgatccacccgcctctgcctcccaaaatgctgggattacaagcgtgggccactgtgcccagccaagtagagttattatcagtggaaatctaaaaagcattttacttgaggcataatgaagtaaaaggttttgtatcatggaattatcaccaaaaatgccatcctggataatgttctcctatagctcttatacatgggctaggatctaggtgttcaataaatatgtgctgaataatttacttttgaaatatgtcacaatgctggcattccaccagaagagaggatacagaagggaacactctcctctctttaagaaccttttgaaaggggcgggggttgcatgtaccatttttgttttcattctgctagtaaaatagtcacttgactacaccaaattgcaaagaaggctggaaaatggggtttcagtactaaggaaggaaaactagatattaggggacaattagaagtttccaaatctcatcactttttttgggggggtgggggaggcatcccaaagggcagactggtttattaggcagcagccaggaaaatcagcggttggacttgtccccacactccagctcatccttcttgttgatggcataggagctggaggaggccttggtggcattgatgagctcatccgccaggcactcagcaatggtcttgatgttccagaaggcagcctcacgagtgcctgtgcacagcagccagacgacctgattcacacagtgcagtggggacatgtccacagcctgttgtctcacagtccctgctcgcccaatgcatgtggagtcctcccagggaccactgttgatgatggcgttcaccaggacctggagagggttctcgcctgtgagcaggtggatgaaatcgaaggcatgcttgatgatgcacatgatcatgagcttgttgctgttgttgcagccgtgcatcatcatggagttagtgaggggctccacaatggggcactgagctttgcggaagcatttggctgcataccacccagcactgtgaggcaggtacttggcatacttctccttcactgcagtgtaatcctgcagggaaatgccattgatctgcatatcatcagtgctccacttcccagagagcttgatgtcaaggggtctctgccactgctggtgctgctgtctcccactcggtcatcctgagggcacagcctgagtgtctctgtcgatcagcatggaccacatgctgccctggcacagacaggccattgctttttaaagtactaatattttaaggtttcccaggatttttttaagctttgttacagaataatatctgtagaaaaatgattacctccatatatgaaggaagacattactgttcacctaccgttgggatgcacatgctttaagttgcttttttagtagtggagacttatgttaatgcagcttgtctgaagtccttttctactgctataacagaataacacagaacaggcaatttataaacaatagtgttttatttggtccacagttctggaagccgggaactccaagagcatggtgctggcatcttgtaaggattttcatgctgtgtcatcccatggtagaaaacaagacagacaggggccaacgagcatacaagacagaaggagaaaatcaggctgacgctatccttttaccaagagcccaatcccaagataactaacccactcccacaataacagcattaatccattcgtgagggtggagccctcatgacccaatcacatcttcaaggttctacctctcaacacgattacaatagtaattaagtttcaaacacatgaactttttggggacacattcaaaccatagcacaatttgcttctctcagtctataaacctctattccacaaagagtcaaacatgtatttagttatgctttcaaaaatatgggcatttggccgagcacagtgcctcacacctgtaatcccagcactttgggaaccagaggcggttggatcacctgaggtcaggagttccagatcagcctggtcaacatggtaaaattccgtctcaactaaaaagaaaaaacaattagctgggcatggtgatacatgcctgtaatcccaactactcaggaggctgaggcaggagaatcacttgaatccgagaggcagaggttgcagtgagccaagatcacgccactgcactccagcctgggcgacagaacaagactccgtctcaaaaaaaaaaaaaaaaaaggcatttgaaagatacggggattaagttgctgatgtcaacatttcgctgtcaattccaaatgtactgatttaagtatttagtagaattgtaaatcagcctttaaaaaaaaaaaccacacatggccgggtgcggtggctcaagcctgtaatcccagcactttgggaggccgaggcggacagaccatgaggtcaggcattcgagaccagcctggcaaacatggtgaaaccccgtctctactaaaaatacaaaaattagccaggcatggtggcgctcacctgtaatcgcagctactcaagaggctgaagcaggagaatcgcttgaatctgggagtcagagcttgcagtgagccgagattgcaccactgcactccagcctgggcgacagagtgagactaagtctcaaaaaaaaaaaaaaaaaaccacacattttctaattcaattggtattctaccatgtagctactgaagcatatgttttgttaaattcctgttacccaagcacttcagagaggcactcctagattctggagacattgtgacttcaggaccattttcaggtttgggccaggacaggttctgaaagatctacttcacctaaaactagacagaaaatgcagtccagttggtacaagcctattaagagaaaggaacaatccaggctgtccttcacgctacgccccatgggttctagtttattctctctcagggctgcttcatgaacttactctgatagagtggtattcacgtccatcttttgagtgtacaagccaaatgtgtaccacaggaactatctgaaaggctaaaacatgttgcataaacaggtacttcccaaaatattctctttctccatatgcttatgtggttgtataacaaaaagattcatctgaataagtcttaggcagctattagaactgttgtattttgataaaggtgtcttgagactaaggtcatacttcctgtgggtctgaaatggactctctcctgaaaggatggctattcagtgtcagtcatttaggagaaaagactgatctttagatgggaaacaaaaaaccaaggcctggaagataatttgactccagcagaagaggaaatacttctttccacatctagactctgaagacagtgtatacatttgtcagttggtctctttcagttataagtaacagaaaagaacatctcaaactggcttaaataatgagtaggattctgtggctcatggaactggaggatcagagttatcatgggtgttatggtctgaatgattatgtctcctcaaaactcttatgccagggtactatattagtccattttcacactgctataaaaacattacctgagctgggcgcggtggctcacccctataatcccaacactttgggaggacgaggagggcggaccacgacgtcaggagttcgagaccagcctgaccaacatggtgaaattctgtctctactaaaaatacaaaaattagccaggtgtggtggcaggtggttgtagtcccagctactcaggaagctgaggcaggagaatcgtttgaacccggggtacagaggttacagtgagccaagatcgtgccactgcactccagcctggaagatttgtttttcattttttttgagagagggtcttactcttgcccaggctggagtgcagtggtgtgatcatggctcactgcagccttgacctcctgggctcaagcgatcctcccacctcaggctcccaagtagctgggactacaggaatgtgctaccacacctgatttgttgttgttgttgttgttgtttttggtagagacagagtttcaccatgtttctctggctggtctcaaactcctgggctcaagcaatcctcctgccttggtctctcaaaatgttgggattacaggcatgaaccaccgtgcctggccaatcaaaaagatttttttaaaaaaatgcattcagggctgggggcggtggctcatgcctgtaatctcagcactttgggaggctgaggcgggtggatcacctgaggtcaggagtttgagacgagcctgaccaacatggagaaaccctgtctctactaaaaatacaaaattagccggacgtggtggcacatgcctgtaatcccagctacttgggaggctggggcaggagaatctcttgaacccactaggcaaagtttgcagtgagccgagattgcgccattgcactccagcctgggcaacaagagcaaaactccattacaaaaaaaaaaaaattagatgcctagcccaaaatattattaccattataacaaagggacattgaataattattatagtaactttattaacatagacaacatttacaaacataaagtgcactgtgctgaaattaaaaatttactgacattttctggtaaccttaccttctcattgaccaatatggaaaatggttttgttcatctatgttgctgtaatgcagttaagcctcttacgtctaattcccactttttttttttttttaagacggagtcttgctctgtcacccaggctggagtgcagtggcgcgatctcggctcactgcaagctccacctcctgggttcgtgccattctgctgcctcagcctccccagcagctgggactacaggcgcacaccgccatgctcagctaaatttttttgtatttttagtagagacagggtttcaccgtgttagccaggatggtctcaatctcctgacctcatgatccgcccgcctgggcctccccaagtgctgggattacaggcatgagccaccgcgcccggcctcgaattcccacttttaacaagagtcacaaaattactgccttctaaaatgtttttggaactatagctcttattaagcaacattccatactgttcacaattttatttacagtgatactatcattgtagaaaccaaatgacaaatcattcaataaattataatcacatattatgccaattaatgctgcagcatctaagctaaaggccaaaaatttctttttgaaggtgtagttttgtttgttgttttaactatcacacattttacaaaataacactttcttccaaaatgcaggtggtgagtccctcacttctgaaccacttctgtaacacagcactctggattaaagaaggaaacactgcactccagcctgggcaacaacagcaaaactccatttcaaaaaaacaaagtggccactggaccaggcacagtggctcgcgcctgtaatcccagcactttgggaggttaaggcaggtggatcacctgaagtcaggagttcgagaccagcctggccaaaatggtgaaaccccatctctactaaaaaaaataaaaattggctgggcgtggtgacgggcacctctaatcccagctacttgggaggctgaggtaggagaatcacttgaacccaggaggcggaggttgcagtgagccaagattgcaccattgcactccagcctgggcaacaagagtgaaactccatctcaaaaaaaaaaaaaaaagcggacactggagtttttttctagaattgctaaatcaactagcttcactgatttctgcagccaataaaccatcaagttagacaggaaaaagtagaatctggatgtttggtgtgtttttcattcagtacccacagagaaggccctcataaaaagaaaagtacagtaattccagtaggctaattttctgatcttaatatttccacccatatggagggtgtcccaaaagtcttggaacggttttgagccttaataagttcaggaatataaatccagcaagctcgtttaaaaaaaaaagtcatctggaggtttaattggttaaatttcataacacttcagttttgtgacttttgataacatatttttcggtttccctgttgtttaagtacctatgtttgaaaatggcaacagtcactgcttttaagttagttattacagctcaaaactgcaccaaaacttttggaattcatgtatgattcctaagtcagaaacctgatcctagctcatttcactggatgaccaacattttaacactagaatgaactaaattattttctttagaagtttcagttatttttggccaggcatggtggctcacgcctgtaatcccagcactttgggaggccaaggggggcggatcatgaggtcaagagatcgagaccatcctggccaacatggtgaaaccccatctctattaaaaatataaaaattaggccgggcatggtggctcaagcccgtaatcccagcactttgggaggccaaggcaggtggatcatgaggtcaggggtttgagaccatcctggccaacatggtgaaaccccgtctctacaaaaaatacaaaaataggccaggcgcggtggctcacacctgtaatcccagcactttgggaggccgaggcgggcggatcacgaggtcaggagatcaagaccatcctggctaacacagtgaaaccccgtctctactaaaaatacaaaaaattagctgggcgtggtggcaggcgcctgtaatcccagctactcaggaggctgaggctggagaatggcgtgaacccaggaggtggagcttgcagtgagccgagatcgcgccactgcactccagcctgggcgacagagtgagactctgtctcaaaaaaaaagaaaacaaaatacaaaaatagccgggtatggtggtgtgtgcctataatcccagctattcgggagtctgaggcaggataatcacttgaacctgggaagcagaggttgcagtgagcctagattgtgccattgcactccagcctgggtgacagagcgagacgccgtctcaaaaaaaaaggagtttcagttattttcttttcttgctatatcctcaggacaaacctgataggtttctcactcacacatcattggctatgtgattagttttgtgataagtacaatggcacaattcttaaattcttgtattatagcaataaatctcattttccatgtaaagtgtcagtggaactaagaatgatttatgatagtaaacatcaaaatgatcgtattttaataaatttccacagattcatccagtttaaaaaacctttcttgatttcaggtgttttctctccttctccttgatcaaggttatttgggtttctatctgtgacttcttttgtttttataagggtctcgtatattttctgggctctgacaatttctttctgagcatcaaaatggactttttgcctggtcaggatgggaacaattaaattaaaatcattaattcgcttgtttaattttctgatgttttcttgaaactgctcacaaacatggttccactgtttcttttcagttggtgtcattggattcccaagttttttcctagacactaaaattgcctctctgagttgctcaatagtatcgcttatttccttttgcttaaggatccattctggttggtatccattatcgatcagtattcggttcaggttgtgagtcatgggatcaatgtaagaacagtcagaaaactttttcagaggttttcctttcccactgagattgtcaaagtctccttttgccatggattcttgaatgaggtcctccactaaacgttctatagcttgcgttatcttttgctgtttgctctgtcttatatttttaacaattacactatcaggaaaatactggctttgtagtttctgcttttgatattccatcacttgttcagcagcacggtctgccctaaattgcctataatgcttctctcgttgagttggagtcccaaaaccaataccttcaaaacttaaataatgtcggtgttggggtgttttatatttgaatttttctacatcttcttcttcttcacctttactctgactggcatttgtttgttctatcacatgggagagcacctttctataagctttttcaatccttataaatgttgcagaatcagcagtattagagccactgtcaggatgatattgcttggcaagcttatgaaaagattccctgacttcatctgcagagcatccttcctccacgttcagcagtctataatattctctgatcttctttttggatttatgggttgacatcattctatttctaatgataccaaaatatggaagcattttcactcgattaggaatcactgtagcctttatcaggtgagatcttaagatctgagccatcatcacatacattgtattcattattgtacccagagttcttcctagcaatgacctataaaacgacaacaaatataggttgaacaaagttgtattatcagttaatttcttattttcagcaataaggtaaaagatacagcatgaatttataagtacaacaaggggcagttcttttgaatgctgctgtcaactttttccttttttttttttttttgagacagagtctcgctctgtcacccaggctggagtgcagtggtgcctccacctccagagccacgcctagctaatttttttgtatttttagtagagaaggggtttcaccatatcgcccaggctggtctggatatcctgacatggttatctgcccgcctcggcctcccaaagtgctgggattacaggtatgagccactgcgctcagccttttttttttttttttttgtctgagacagggtcttgctctgttgcccatgctggagtgcagtggcacaatcgtggctcactgcagcatcaacctcctgggctgaagtgatcctcccacctctgcctctcatgttgctaggactacaggcgtgcaccaccacacctggctaatttctgtatttttgtagggatggggtttcgtcatgttgcccaccctggtctccaactcctgagctcaaacgatctgccagtttctgcctcccaaagtgctgggattataggggtgagccactgtgcccagccacattcttttttcttttcttttcttttcttttttttttttttgagacagagtctcacccaggctggagtgcaatggcatgatctcggctcactgcaacctctgcctcccgggttcaagcgattctcctgcctcagcctcccaagtagctgggattacaggtgcacgacaccactcctggctaatttttgtatttttagtagagacggcgtttcaccgtgttagccaggatggtctcgatctcctgaccctgtgatctgcccgcctcgacctcccaaagtgctgggattacaggcgtgagccaccgcacccagccccaccagctgcattcttatagctatatttcactgatgtgggcagaaaagtggaagctgatgaagtttagtgttaacatattgtggggccaggcacggtggcacacgcctgtaatcccagtactttaggaggccgaggtgggtggatcacctgaggtcaggagttcgagatcagcctggctaacatggcaaaaccctgtctctactaaaaatacaaaaattaactggaggttgcagtcccagctactcgggaggctgaggcaagagaatcgcttgaacccgggaggtggaggttgcagtgaaccgagatcgtgccactgcactccagcctgggcaacagagtgagactctgtctcaaaaaaatatagatagatagaatctggattctacccctcactaactaaccgtatattttacaagtggaaagttcttagagatcatctaatccaatcttctcatttaatgagaaaacgtaggtccggaaggttaagcaatttaaccaagtcccataacaaggtgtaagcaaaatggttaggggtgggcacagtaaaaaaggaggcttgcttaactgtctatacctccagccgattataaactgcacgagagtctgcatcatctcaagaagtcttctcataagacgacttatggacaaggtacgtacctggtctgatactggattgaatagaatcaagtgtccaaaagactttaagctccacagctcgctaggaaggagctatctgccagaggccagaaaaaccatgatgaattgtgaggcctcccaacacgtttgctgctattgcaataacatggtctcgaagaggaggaagacttgtacactgacaatggccaaaaaatactggaagtggcttaattggaattgggatatataaacgctaaaacggagctcctgagaccccctattttctaggcaatcggtgccaacggtctgggagccggctgcgaaggtggttatcatggcaagggaggtcggtcctgccccgccccctcctcacctgcgcagacctggggtaggggttccgcggctcccgcccccctgccgcgcctctgcgcatgcgtgcgcggtccgcccttcactgcgggtgtccctcccaccgcctccagctggtgcctccgccgggctagaccatttgccactttacactgaggggctcgggggtacggaaggcagaatcgtacctgattgggacaggtgaccttaccaggaaaacggacaatcttccgccaaacgaactttaccccggaggacccaggcagggcacctcgggagccttcgtcccgaccggggaccaccagctccacctccgtccccgccccgagcggaggtggtccggccgattgggattgtgggagatgtagttcgctagaaggggcgatgtgcgcctgcgcctctcgggagggacttagggggcgtcgaaaatgatgtaaagaccgagttggcggcgtggggagttgtggctcggagggcgagggtaactttctgggggcaggggaaggcaaggctgtttccccggaacgggaccggaacaggtttattcggggtcacagaaggagtcacctgcgcagatacatgaggcttaaaacctgcccttttattaattcaagtactgttgaggggctggcgacaggccagaggacaaaatcaaaatagggatcttctggcttggagttcaaccactgacgtggggactgagcatttcccctctctgtacaggaagcaagttttttaacaaggaaaaagaaaaaggataaaaagaaaaaggcagaggcttgggagttttcagatctgggttgaaaatcctgtttcttctgcttgcaccttaggcaagatacctgcaaaatgagagttgcaataaatagtaaactatagtaaatagtatgccattgtgctaagtgctttatgtatattctcatttacttttttttttttttttttgagacagagtctcgctctgtcgcccaggctggagtgtggtggcgcgatctcggctcgctgcaacctccacctcccgggtttaagctattctcctgcctcagcctcccgagtagctggaattacaggcgcgcaccaccatgcccagctaatttttttgtatttttagtggagaccaggtttcaccatgttggccaggctggtctcgaacccctgagctaaggtgatctgcctgcctcggcctttcaaagtgctgggattacaggcattcatttaatctttacaacagccctctgagataaatgctgttattttccctattttacatataatgaaataataattgtatcaacttcattgacttttttagggggagaattacacaatgtatgtaaaccacttggcactgtgcctcgcacattaagcaatattttttgttatgactgtgtctcctaaaaggagccagaaataggtattagcctcctcagcttctacatcataaacattagaatcatttattgccatctatgtaggaacacagaaaaagatacagtataaactctgattctgagggctttagttataagcaaacaatcaacaaaataactcatgtgaaagaaaataggatttctggccgggcgcggtgctcacgcctgtaatcccagcactttgggaggccgaggcgggcggatcacgaggtcaggagatcgagaccatcctggctaacacggtgaaaccccgtctctactaaaaatacaaaaaattagccaggtgtggtggcgggcgcctgtagtcccacctgctcgggagtctgaggcaggagaatggcgtgaacccgggaggcggagcttgcagtgagcctagatcgtgccactgcactccagcctgggcgacagagccagactccgtctaaaaaaaaaaagacctggccactaaaaaatttttaaaaagaaaaataaggccagacgcagtgctcacgcctgtaatctcagcactttgggaggctgaggcaggtggataacctgaggtcgggagtttgagaccagcctgaccaacacggaaaacccccatctctctaaaaatacaaaaaattagatgggcgtggtggcgcatgcctgtaatcccagctactcgggaggctgaggcaggagaatcgtttgaaccctggaggtggaggttgcagtgagctgagattgcgccactgcactccagcccaggtgacagtgcgagacactgtctcaaaaaaaaaaaaagccaccaagcaaaacttcctaaaagttgccagtagccatccccctcttctgcttccaggcccagtaaggtgccttatatctctcaatctcatccttctcccagccttgcttctaaatgcactccaaggccaggcacagtggctcatgcctgtaatcccagccctctgggaggcccaggtgggaggatcacttgagcctagggatttgaaccaacctgggcaacatagggagaccccatctctatttatttaaaaaaaaagtaaaattaaaatacactccaagtgtcaacacttcacgcagaaaacagaaatgttgaagttagccttgcttccccagctgctcaaggaccttttgaaatcttcaactgagtgcccagcgaaggctggggaaggggcggggactgtccatcctccttcccaataccagtggtttatcagtgtattcagcccacaaagcaagtcccttctctaggtacaggggaaaatttcattagtaaaaaaataagaattttccccttcaatccattaaaattataaaaatacataaaacaagatagaaatgacagaatgttctcaataaattgaccatataaaaggccatactctggctgggcacggtggctcacgcctgtaatcccagcactttgggaggccgaggtgggcagatcacgaggtcaggagatcgagaccatcctggctaacacagtgaaaccctgtctctactaaaagcacaaaaaattagccaggcatggcaccgggcaactgtagtcccaggtactctggaggctgaggcaggagaatggcatgaacccagaagcagagcttgcagtgagccgagatcgcgccactgcaatccagcctgggcaacagtgcaagactccgtctcaaaaaaaaaaaaaaaaaaaaggccatactcatcctcagagattgcaaccaaacgatacattaattaatttaaaaaatgttttaaaggttatattcagcctaagaatgattcacacaaactttttttttttttttttgagacggagtcttgctctgtcgcccaggctggaatgcagtggcacgatctcagctcactgcaacctccacctcccaggttcaagcaattctcctgccccagcctcgcgagtagctgggattacaggcgcgcaccaccacacccagctaattttgtatttttagtagagacagggttctgccttgttggtcaggctggtctcgaacccctgacctcaaatgatccacctagggctcccaaagtgctgggattacaggtgtgagccactgcacctagcccacacaaactttggaatcttgattacctctgaaaatcttcgggtagacgggggagtgtcccaagattttcattttgaaccactgttcataataggaagaataaagtcaaattacagagagagaaataaattatgaaagattccatgctatagaccagtgccgtggcacatacctgtggtctcagctactcaggaggtaggaggatcgcttgagcccaggagtttgaggcttcagtgagctataatcgtgccactgttattcccgcctgggtgataggtgagaccctgtctcttaaaaaaaagaaagaaaaacgaaagaaagaaacagtgcagtcataaaagagaatgagatcatgtcttttgcgggaacatggatggagctggaggccattattctcagcaaactaacgcagaaacagaaaaccaaacactgcatgttctcacttataaatgggagctacatgatgagaacttaggaacacaaggaaacaacagacactggggtctgcttgaggtgggagggtgggaggagggagcggaggaaaacagagagctattgggtactgggctaaatacctgcatgatgaagtaatctgtacaccaaccccccatgacataagtgcacctatgtaccccttataggtgtaagccaccgcgcccggccagtaattacaataaggagacgctatgtacagttgtctccctccagatgacctggtcacttctccactctttgggctaaattgtgccccccatgttgaagccctaacccccagtactttagaatgtgactgcatttggagataagttatttaaagaggtgattaagttaaaatgaggctgttaaagtgggtgataatccaatctgactgacatccttataaaaggaggaaatttggccccagagagacatcagggttgtgcacacactgagcaacgtccctgtgaggacacagaaagaaggcagccatctgccggccaaggagaggcctcaggagaaacccactctgcagacaccttgaccttggacttccagtctccacgactgtgggagaataatggtctcccgtagttgaagacccagtctgtggtgctttgtcacatcagccccaccagaccaacacagcaggtgtctttgatccttatacatcccttcagtaggtcccagggatttgtgttacccaaaatgtttcctcccagatggaaaactctgaaagcaggtggaagctttccccctcattttcctcttgctgaacacacccctgccctgcaggaccagctgtgggctgctgcctcctgctttcctctttcgaagtcattctgccaacttggagatttggatttgggtgagatgtgctgggggtgggatgtggggcagagtctccccatccgaagaaaggagtttctgatcctgggatttcggatttgctgaagggtgcttgtgcgggtggcactgacttttctctcttcttgctgtagttggcctctaagagaaaggcaccagaagctcgttctccgctctttgagacacctttcttcaagcttcacagcgtccctctctctctctcctgggtccccctactgcacagcctactcatacccagtgtccttggctggctccgcccttctcatgcaattggtgctctcagattccacacctctacattatgttcattatctactctcccttgccaatgccaacgccaatgcctaaacctcctcctcgaagctaatgactgaccccacagtggtgtcacagtgttgaatacaggaatccctcaaggtgtacaaagaagtcccacctcccctctaagtatcatccctccctcaatttgcaaaagaaaggcacacccctcatttaccccagactgttaacaccttccaggcagcaaaggtgcaactgaaaaggttgatttactgtgggtgctgaagaaggaaaattaatcctttacagattggatggtttggccaggtgtaatggttcacccctctaatctcagaactttgggaggttaaagggggaggattgcttgagtgtagaagttcgagagcagcctggacaacacaatgagaccctaactctacaaaatacaaaaattagccaggcatggtggcatgagactgtagtcccagctaatcaggaggctgaggtgtgagaatcacttgagcccagaaggtcaagcctgcagtgtgccgtgatcatgccagcgcacttcagcatgggtgacagagcaagactctgtctaaaaaaaaaaaaggccgggcgtggtggctcacacctgtaaacccagcactttgggaggccgagacgagcggatcatttgaggtcaggagttcgagaccagcctgaccaaaatggtgaaacccccgtctttattaaaaaatacaaaaattagctgggagtggtggcagtcgcctgtaatctcagctactcggcagactgaggcaggagaatcacttgaacccaggaggcggaggttgcagtgagccaagatcacgccactgcactagagcctgggcaacagagtgagactccctctcaaaaaaaaaaaaaaaaaaaaaaagttgcgtggtttccaatacttggttttcaacaaaagtgaaggaggatctaatagactcctcagctgaatatttcatttgaaatgattttcagtggtagattttcctggtgcatataactgaagcattcaaggagttgagtgatattgttataacaactatttttttttcctgtgactttctggagtttggtgatgtcggaaatttaaaatgctgtttggggccaggtgcggtggctcatgcctgtaatcccagcactttgggaggctgaagtgggcggatcacctgaggtcaggagttcgagaccagactggccaacatggtgaaaccctgtctctactgaaaatataaaaattagctgggagtccgggcatggtggctgtttgtaatcccagaactttgggaggccaaggccggcagatcacctgaggtcgggagttcgagaccagcctgaccaacatggagaaaccccatctctactaaaaatacaaaaattagctgggcgtggtggcgcgtgcctgtaatcccagctacctgggaggctgaggcaggagaatcacttgaacccgggaggcataggttgcagtgagctgagatcttgccactgcactccagtctgggcgacagagctagactccgtctcaacaaaacaaaaaacaaaacaaaacaaaacaaaaaaaagcctgggtgtggtggctcacgcctgtaatcccagcaatttgggaggccgaggcaggtggatcacgaggtcaggagttagagaccagcctggccaagatggtgaaaccccatctctactaaaaatacaaaaattagccgggcgtggtagcgggttcctgtaatcccagctacttgggaggctgaggcagagaattgcttgaatcggggaggcagagtttgcagtgagccgagattgcaccactgcactccagccttggtgacagagtgagactctgactcaaaaaaaaaaaaaaaattgttgttgaggtttcagtgtccacagatatttcaattcatgaaactttcattttataaagcaaaatcaacttgtaatattaaaatcttcacatctttattgcaatgctcagaatacaggtggctcaggagttagcttcttaaataagtttacacatgaggattatcaggttaacagatgggggatttgaggattaggcttgctactgagtctttaatatgatttctgttacaaagcctggaagttggaagttctacctatattcatttaaaagacttcatgttctgaatgtgaagcatgttcaatgtactcgttgtatttaaaaaaactatgaatcaaattttttataaaaaaagatttttttttttttttttaggccaggcgcggtggctcatgcctataatcccaacactttgggaggccgaggtgggcagattgcttgaggtggggagttccagaccagcctggccagcatagtgaaaccccgtctctactaaaagtacaaaaattagctgggcatggtggtaaacacctataatctcagctattcaggaggctgaagcaggagaatcccttgaacccgggaggcagaggttgcagtaagctgagatcgcgctactccactccagcctgggtaacagagtgaaactccatctgaaaaagaaaaaaaattgatttgttttttttgagtgacagacaagttgggtctctccttttgggaaacagttttagagatataattcatatgccatgcaatcatgaatttgacatgtacattcaatggctttcagtacattcttgtggttgtgcaactatcactgcaatcaattctagaacattttcatcactcaaacaaaaacccctgtaccctttttttgtcaccccaaatacctctatccaccttaggcaacaactaatctattttctgtcttctggatttgcctattctggacatttccttattaaatgttattcattattattaggatttttttttttttttttttgagacagagtcttgctctgccactcaggctgaagtgcaatggtgccatctcgtctcactgcaacctccacctcccaggttccaacgattctcctgcttcactctcccaagtagctgggattagaggcacctgccaccatgcccagctaatttttgtatttttaatagagacgggatttcaccattttggccaggcaggtcttgaactcctgacctcaagtgatccgcctgcctcgacctcccaaagtgctgagattacaggcgtgagccaccgtgctcggcctcagttattattattagttttagagacagggtctcactttgttgcccaggctggagtgtagtggcatgatctcagctcgattgcactcaacctcctaggctcaagtgatcctcccacctcagcctcccaagtagctgggactacatgtgtgtgccaccacacctggctaatttttttttttttttttgagacgaagttcccctctgtcgcccaggctggagtgcagtggcgtgatctcggctcactgcaacctccgcctccagggctcaagcagtcctcctgcaggcttcagcctcccgaggagctgggactacaggcacatgctccatgcctggctaatttttgtatttttagtagagatggggtttcagcatgttggccaggctggtctcaaactcctgacctcaagtggtccacccacctcggcctcccaaagtgttgggattacaggcgtgagccaccgcgcccggccctttctttcttctacttcttattatttttgagacaaggtctcactccgtcacccaggctggagtgcagtggtgtaatcccagctcaatgcaacctccaccttccaggttcaagtggttctcctgcttcagcttccagagtagctgggattacgggcaagggccaccatgcccggctaatttttgtatttttagtagagatggcatttcaccatgttggcctggcaggtctcgaactcctgacctcaagtgacccccctgcctcatcctcccaaagtgctggaatataggcctgagccaccgcacatagccacacctggctaatttttatattttattctttgtagaaatggtttcttgctatgttgcctaagctggtctggaactcctggactcaagcaatcttccctcctcggcctcccaaagtgctgggattacaggtgtatggtactgcacccagcctggacatttcatataaatagaactgtataatatgtggtcttttttttttgagacagagtctcactctgtcaccaggctggagtgcagtggcacgatcttggctcactgccacctccgcctcctaggttcaagcaattctcctgcctcagcctcctgagtagttgggactacaggcgcgcaccaccacgcccagcttattttttatttttattttttcttcttttttcttttttgagacggagtctcgctctgtcacccaggctggagtgcagtgatgcgatcttggctcactgcaaactctgcctcccgggttcacgccattctcctgcctcagcctcccgagtagctgggactacaggcgcccgccaccacgcctggctaattttttgtacttttttagtagagacggggtttcaccatgttgccatgaaacatttaataaggaaatctcgatctcctgaccacgtgatccgcccgcctcggcctcccaaagtgctgggattacaggcgtgagccaccagcacccaaccgcttatttttatttttagtagaaatggggtctcaccatgttggccaggatggtctcgatctcatgacctggttatctgcctgcctcagcctcccaaagtgctaggattacaggcatgagccaccgagaccagccagtctttttttttggtgttgttgttgttgttgagaaaacgtcttactcaggctggagtacagttgtgcgatcacagctcactgaaacttcgacctcctgagctcaaggaatcctcctacctcagcctcccaagtagctgggactacaggtgtgtgccaccatgcctaatttttgttttatttgtagtgatgggggtctcactatgttgtccaggctggtcttgaactcctgggctcaactgatcctcctacctgggccccccgtgctggaattacaggtgtgagccaccatgcctggccgcatgtggtcatttatgactgaattcttttttttttttttttttgagacggagtctcgctctattggcaggctggagtgcaggggcgttagctcactgcaacctccgcctcccggattcaagcaattctcctgcctcaacctccctagtagctaggactacaggtgcacaccaccacgcccagctaatttctgtatttttattagagacagggttccaccatgttggccaggatggtcttgatctcttgacctcgtgatccgcctgcctcggcctcccaaagtgctgggattacagagctgagccactgcacctggccctgaattctttcacttagcataatacttcaaggttcacccacactgtagcatgtgttagtatttcattcctttttataattgaatagtattcaatgtatggatatatttatccatatatttatcagttcatttgctgatgaacatttgcattgtctccacttatgaatcagtttttaactgttaattaacatttggctccagataaaggaaaatgatctaacactgtggtaaatgtaaaatttacatggcttgtgaaagaatggctgtcagagatggtctcttttaaacagtggaggaggcaaatgtatgcattagaattgctgaaaaacactttgggaggtaaagacaattttggttttaaaaaggccaaaggagggccgggtgcggtggctcacgcctgtaatcccagcactatgagggccaaagcaggcagatcaaatgaagtcaggagttggaaaccagcctggccagcatggtgaaaccccgtctctaccacaaatacaaaatgagccgggtgtcgtagtgcatgcctgtaatcctagctactcaggaggctgaggcaggagaatcacttgaacccgggaggcagaggttgcagtgagctgagatcttgccactgcaccccagcctgggtgactgagtgagactgtctcatcaaaacaactatatgaatgatatttgcctactttaattgacaagggaatagagagacacagtggatgagaaatgtgcctaaagttttatgcttgaatctaaaagccaccaactctccccctaatcctctagtgacttgcagagaagtatggatctttataaaccacaggataattaaactttactgaagctaaaatctggggattacagaaactgtcaataattagaggaacgtttaatgatacttcaaagcataaaggatactatccttcagaaatgggagctatccagaaatcttaacacaccagattatgatcacgatggtcggaaaagtctcaaatcagctatacaatataaggaagagatactgccttgttagacttggggaagagatagtcacttgacactgatcagaaggaggctgggcaacttttacacaccggaatctataaccaagattataaacggaacccaggtgatacacttgggtttgtcctcatgtttcttttcctcattttaactcagatacatccagcagtcatggcttcaaaagcatatgatcaaagatcagaaaacccataacttatttatttatttatttatttatttatttatttattgagatggagtctcgctctgtcgcccgggctggagtgcggtggcatgatctcagctcactgcaagctctgcctcccgggttcacgccattctcctgcctcagcctcccaagtagctgggaccacaggcgcccgccaccacacccaggataatttttttttttttttttttttgtatttttagtagagacggggtttcaccgtgttagccaggatggtctcgatctcctgacctcgtgatctgcccgcctcagcctcccaaagtactgggattacaggtgtgagccaccgcacccagcccattattattttttgagacaagtctcgctctgttgcccaggctggagtgcagtggcatgatcttggctcactgcaacctccacttcctgggttcaagcgattctcctgcctcagccacccgagtagctgggattacaggtgcgtaccaccacacccagctaactattttttgtatttttagtagagatgggatttcactgtgttagccaggatagtctcgatctcctgacctcatgatccgcctgcctcggcctcccaaagtgctgggattacaggcgtgagccactgtgcccagctgaaaacataaaacttataaacatggaggtgattcatcatgttgtcaggcaataccaaaaaaaaaaagagggggtgacggttagaaaaagagcataaaaaagaccaagaaaactgtatgtctcagatatgctgcactaactagtcttgtttttagtgagtctctatttattaaaaaaatagatgaagtaagggtgaggtcttttttgtcttttagcagtttttcttttgggccaagtccatgataaaaaaccaccatgcaaacagcaaataattctttctaaactggccccatttctgaattaaaaggcttcattcctctttaacccaacagatcttgccattttctccaagctgtacagttccactggccaccagctgaagggctgcaggaaatattttatgttctgctaattttactctttcagaaagagttgcgacagtatcacccctcttcacgggaacagcttcttgcaaaataatctgtccagcatccacatcttcctggaaaagtaagcaaaagttttgaacattaccttctagccagtgtcatttacatctgactactaatattatgttggtagaaaaagacatactcacagctacaaagtgtacagtgcacccagtaactgtgactccggtttccagggcttgctcatgggcatttgaacccttaaaagaagggagcaaggatgggtggatattgagcatttttcctaaaaattaaaaaaagcatagtggtcagaatttaaaaatcctgggtattctgttaaaggaatacgttttcctatctagatccgaagtcaaacaggagttggatttctgggatggatgttttctttgccaaacacagaaatgaggtaaaagtaagttctcatccaagaaggccctggaagcagcaagtacccgccttgcacagttaaaggcatgctggggtgctctgaacagacattcatggtgacaggaaggtggggagttcaagctgaataccagcttgttgctggcacgtactattaaaaataagcaagaggttcttacatagcatctatgtgcttgacttctaaccacaaagtgacctgtccaccagacagatgctagattagttctgtgtggctcatgtcaccaaaggcattgtctattttatatcacaccacaagtgctctaactacattcacctaagaatacataaactctttggagggaaaatgcatttattgaccaactgtgtgcacacatacacaaacaggatgcagtcaaggcttttgggaagaaggcagtaacatagatagtatgtgttttctggcaataacctcctccttgccaactcctggcaatggtctatgcttcctaagagaggatggactcttcattttgggatatacggaatcactctcttttgcttccaaacaaataaaggaaggtcttctgaatatttattcaaaagatgaaatattatctttgcagtaatgtgaaacaaaactaagctacattagaaaaagtgattaattacagcaagccaaagtaaatggatagagagcaggttaataaatcatcattgggtcattctttagtgtaaaacaaaggaaattaaactgtgacctgtgttaaagtattaataaaatatcacagtcaaacaggagttggatttctgggatgggtgttcactactgggattgtttggcaagttatctgttctggagaccattttcaattgatttcccaatgtgatgtcaaataatttttgcttaccattccacttttggacaaaggggccagaaagaattctcatgaatcctgcaagacagactatgtctatggagaactcttcaaggactaggtcaattgcactgtcaaattctacacgatttttatacagtttatgattaattacctgtaatagaaaaagataagcacaacccttttcaatgaattaccaaaaataattaaaaactcaacctttacacagaccatacttcacttccttgtaaagatatacctgatagagagattattaagaaagggacaggatgaagaaggcaagcccagcacccacccaaaatggcgaagtcccaagaacaagtgcccatagaccagggtcctgtgagggcagattacgagcttaaatatggcccacagcaaagatattttcccaagtaacttactctagtgggaataccagctctttccgctttatctaacccagctactgcggctttgttggagataacaatatcaatttgtgcagagctatttggttcccgagtactgtctataagtgcttgcaggttcgatcctgagaagggagaaaaacagcagtgagctcatactactacttctttttttttttttgagagggagtctcactctgtcgcccaggctaggagtgcagtgccacgatctgggttcactgcaacctccacctcccgggttcaagcaattatcctgcctcagcctcctgagtagctgggattacaggagcccaccaccacacctggctaatttttgtatttttagtagagatggggtttcaccacgttggccaggctcgtctggaactcctgacatcaggtgatccgcccacctcggcctcccaaatttgggattacaggcatgagccaccgcgcccaacctcacactttttaaaaaaagagatgtgccattttgaataggggacagtcaaattttctgaataaatgtcttggaaaagactggtgatatgtgaggcttctaaattccctttctcttggcacaggcaactaaagtaaatatggaaaaagcttctgtatagcaatggaaacaatcaacaaagtaaggagacaacccacagaatggtagaaaatatgtgcaaactacccatctgacaagggattaataaccagaatatataaggagcttaaacaattcattagggaaaaatctaatactctgattaaaaatgggcaaaagatctgaatagacatttcttaaaagaaaacacacaaattgcaaacaggtatataaaaaggtgctcaacatcattatcatcagagaaatgcaaatcaaaactatgacatattgtctcgccccggttaaaatggcttttatccaaaacacaggcaataacacgctggcgaagatgtggagaaaagggaaccgtcacacactattgggaaggtaaattagtacaattattatggagaacagtttgaagggtcctcaaaaattaaaaaaaagagctaccatatcatccagcaatcccattgctaggtatatacccaaaagaaagaaaatcagtgtatcaaagagatacctgcagtttcatgtttattctccctagccaagatttggaagcaacctaaatgtttatcagcagacaaatggataaagaaaatgtggtacatcacacaatggagtactattcagccataaaaaagatgagatcctgtcatttgcaacaacatggatggaacgggaggtcattaagttaagtgaaataagtcaggcacagaaagacaaacctcacatgttctcacttatttgtgggagctaaaaattaaaacagttgaactcatgatgatagtgcaatgatggttaccagaggctaggaagggtagtgggagagacggggagaggggatgctaatgggtacaaaaatatagttagaatgaacaaaatctagtgtttgatagcataacagggtgactatagtcaacaataatttattacacattttaaaataactggaagaggctggatgtggtggctcacacctataatcccagcactttgggaggccaaggcaggcggatcatactgaggtcaagagttcaagaccagcctgaccagcctggccaacatgatgaaaccccatctctactaaaaatacaaaaaattagccaggcatagtggcaggtgcctgtaatcccagctactcaggaggctgagacagaagaatcacttgaaactgggaggcggagtttgcagtgagccgagtctgcgccactgcactccagcctgggcgacagagtgagactctatctcaaaaacaaaaacaaaaacaaaacaaaaaaaaactgaaataaaataactggattgtttgtaacacaaagaataaatgcttgaggtgatgaataccccatttacagggatgtgattattacaggttgtatggctgtatcaaaagatctcatgtaccctataaatatatatacctaccatgtacccatacaaattaaaaattaaaaaaactcccttcctcttgggataatggattaatagattgtgaaaagcacagatattcctggatagcctccagttccatccatattgctgcaaacgacgtggtttaggatatgtaattgctcctaggatatgtaattgctcccacaaattctgtatcttgtgatctagcattgtagtagaaacagtataacattatgttaaaactgactgatgagaaataagctgcttaattaagcaagaaaaactgaccctctcaagaacaaaccactatgctatgactcttacaatagtttctttaaaaaaaaaaaattttagattcgggggtacacacgcttgtttattacatgggaatgttgtataatggtggggactgggcttctagtgtacctattacctacatagtgaacattatacctgatagaaaaattttcaaccctcacctcttctcccacacttccctgttttgtatctattgtttccatctttttttttttttttttttttgagatggagtcttgctctgtctccaggctggagtacagtggtgcaatctcagctcattgcaacctctgtctccagggttcaagcaattctcctgtctcagcctccagagtagctggactacagacgtgtgccaccatgcccagctaatttttgtatttttagtggagacagggtttcaccatgttggccaggatggtctcgatctcttgaccttgtgatccgcccgcctcagcctcccaaagtgctaggattacaggcgtgagccacagcacccggccctattgtttccatctttatgtccacatgtacccactgtttagctcccactcataagtgagaacatgcaatatctggttttctgtttctgaggcagttcactcaggataatggcctccagttccatccatattgctgcaaatgatgtggttttattcttttttatggctgcatcttacaatagcttctttgctttattatcaacttgggcctaaagtacattaaaaccttaagatcgacctgtaaagcaattaaacttctgggaatgaatcctgaagaagtatcagagctggttgtggtgctgcatgcctgcagtcccagctactcggggggctaataaggcggaaggattgcttgaggccagagctggaagctgcagtgtactatgactgcatctgtgaatagctactgtactctagcctgggcaacatagcaagactgtctcaaaaagaatcactatgatcttggccatcaaataaaaaaaaatcacatatgcatttaagaacatactgaatatttgcaagaatgttcatagcagtgttacttacaatagagggaaaaaaatcaggctacatccatctgagagaatacaatactcttattactttacccctctatccataaaggttaaacataaacttcttctaattaataagataacaataaaaattcctcaactgttttcagacttttcaacaacaaagctatgatacaaaatgagctgtagcttctatcttttctggtttctctttaaccagctttctgacatcctttacttttttctttgggagctgtctcaaattcctaagaaaagtggaaagactaagaatgctgaaaagacaaagacaaccctcatgattccccccagtccctagactctgccgagagtaaccttacaatctcacaagagtgcggggaggaaaggaagggcagtcaacagctctacagtgaaggggaagccacatctcacctgttccagatattaagacagccactctggccttttttttttcaaaagagaaatgatttgtcagggagccattcttcaacactgacccatttatttgcatgctttcaatcagattcttgactttcacacgtggggaaccttcatttcaaacatatccataaataagtaaagaacaattgtgaattaacaagaataatggaaagaaaaatattttatgaaaactttagggtatgttttatcctgaaaataagataatgcaaggactaaaatgaacaacacatttgtatcacttaacactactctttcataaaaacttccaaaaggtgaacatatgtaattacttcaactaaaagctgcagatcacatcactatcttgaagtgcacggtggatatatatgactgcctgccagtattctgcccctactccccaaatcttcctagcgagaccacccacagtagtgccatgatctcctggtctcggggataagcatgtgacctagcaaagccatttaaaggcttgatatgcgatgttaagaaaaagagggtctctcttttttttctttttgagatggagtctcgctctgttgcccaggctggagtgcagtggcgcgatctcggctcactgcaagttccgcctcctaggttcacgccattctcctgcctcagcctcccgagtagctgggactacaggcgcccgccaccacgcccggctaatgttttgtatttattagtagagacggggtttcactgagttagccaggatggtcttgatctcctgacctcgtgatccacccgcttcggcctcccaaagtgctgggattacaggcgtgagccaccacgcccggctgggtctctctttcttattgtaatgtgagctgaaggatgttatctttccggcatttggagaacccgcttgaaaatgaatcctacacaatagaggaaagaaaggcagatacaggtaaagtcaacaaggtctgacattttttttttctattttttatttttgtgaatcttctctgtatcgttccaattttagtatgtgtcctgccaaagcaagcatgtgacgtctttgttagtgaatctgagtggattttctgcccctctgccaagttctagcacttctcgcagagtcctgactgatacagtacttgtcagggtgcttgctcgctattccttgaatcgagctgagtgacagcagagccatgaggtcttgtgtgtagggagattactttgggaagcgatcctgtggggtgtggctgtgcatgcatgaatgcttagttctgaggcagaaatgaagagatacgtggtatcgctggggtgggtgctgtcatgttacatctgtgtaaagatagttgccatagcgatggctgcactaaaaggtgggcagaaagcttgtgaggcaaggctgaggtatagctaaaattatacagctaaaattatatatctaaaaatgagtaaggagcaagtaccttcagctcgtgcaaccacactgccaatcacccaggcttcttccttgtgctgctggatatccctcagaatctgctctgtctgctcctttgataccacaaggacagcgccaaccccacagttaaatgttctggccatctcttcctcagagaggtgtccttcctgctgcaaccatgagaagaccctggggatcctccaggtctgggcatctgaaaaaaatagacacgaattgtttgattttcctaccttctcacacaaagtacaaaagtatgcacatattcaaagatgtggaaattataatcaggctctgctattttatgtagggtaaaactataaattggcctctgagaactttttatttggggatccatttgtaccttagacattaagaacatttttttgttgacacacttggccagtactcacaaatgagtgaggttttgtgctacattaactaactagacccttagacattccctaatggatcagatgagctagtagctgaattccagcaaaggccagtataccatccttttgtgaatgtttggctgagtctttgtgatgaccaaaatgcacccaaagtacaatgcaaaactagatggcttatctacatatttagagaaaatgcatacactcctcaagaaaagttatgttaatggaaggcggatcaacaccctctccctctcattctttttaaaatttagacttcctaggtctgctataagaatacattctctcggccgggcgtgagaatcccaacactttggattacatgcctgtaatcccaacactttgagaggctgaggtgggcggatcacgaggtcaggagatcgagaccaccctggccaagatggtgaaacccattctctactaaaaatacaataattagctgggcgtggtggcgcacacctgtagtcccagctactcgggaggctgaggcaggagaatcacttaaacctgggaggtggaggttgcagtgggccgagatggtaccactgcactctagcctggtggacagagtgagactccgactcaaattgaaaaaaaaaaaaaaaaaaaaaagaatacattctctcttatcacaaataatacaacaaaaatctctaataaaaatttttaggtaaaggtctatatacacacacacaacatttctgaatttaaaaagaatctggatagttctttggaatctacgattatgggatctgattttttaaaaaaactatactgaattaaattatttatgatgctcttaagaaagggaagccaatgtgaactcagctttttattaaataataaggtttactatcagttctgcctatttatttgatttatttattggataattttttttttctttgagacaggatctggctctgttgcccaggctggagtgcagtggcatgaacacggctcactgtagccttgatgtcccaggctcaagtgatcttctcacttcatcctcctgagtagctgggactacaggcatgcgacaccatgcctggctatttaaaaaattttttttttggagagacagggtcttaccatgttgcccagtctagttttgacctcctgggcttcttctgcctcagcctcccaaagcgctgggattataggcatgagccatcatgctcagctgataatcagttttttaatactttggagttgatacaatttttttttttttgagacagagtatctctctgtcgtttaggctggagtgcaatggcgtgatctcgactcactgcaacctccgcctcctgggttcaagctattctcatgcctcagcctcccgagtagctgggattataggcatgtgctaccacacttggttatttgtgtgtgtgtgtgtgtgtctctgtgtgtgtgtgtgtgtgtgtgtgtgtgtgtgtatttttagtagagacagggtttcatcatgctggccaggctggtcttgaactcctgacctcaggggatccatccacctcagcctcccgaagtgctggaattacaggggtgagccaccatgcccagcctgaagttgatacaattttaaaaatgaggcgggtgcagtggctcaggcctgtaatctcagcactttaggaggccgaggcccgcagatcacgaagtcaggagttcgacaccagcctggccaacatgatgaaaccccatctctactgaaaatacaaaaattagctgggcgtggagacgcacatctgtaatcccagctactcgggaggctgaggcaggagaatcacttgaacccgggaggtggaggttgcagtgagctgagatcgcactactgtactccagcctgggcgacagggtgagactctgtctaaaaaaataaaaataaataaaaataaaaatgaatcacatgtctatgactcttagattcaattccatttatagtagctgggaaatgtccattcttaatagttgacctcagatttagtaactacattgttcactatgctctcaatagttaaaagtaaatagcaacttaaaactaaatagtggtacatctgtaaaatggaatacttgttatcaaaaatgatgctactaagacaaggagatagtgatgacatatttaatggcagggcaagtagcagattaccaaattatgatcttgttttagtgaagttttacaaaatatttataggaaaaaacactggcagactaagagtctagcttctataaatgaacaagtacttcatgaataatgtaagttgtaattttaatgttgaaaagtcctggccaggtgtggtagctcatgccagtaatcccagcgctttgggaggctgagatgggcagattgctctgagccaaggagtttaagatcagcctgggcaatgtggtgaaaccccgtctctactaaaaatacaaaaaatagctaagtgtggtggcgtgttacctgtggtcccagctacttaggaggctgaggtcggagaatcacttgaacccaggacgttggggcaatagtgagctgtgatcgcaccacggaactccagttggggcgacagagtgatactctgtctcaataaaaaacaaacaaaaaaacccccagaagtccttacttaaatctgttgtcaaagtatgattcctggaagaaactttagaggctgatgcaaggaattgtgcaatggcttttattggaatacagacatttgtgtaactcaaactataactgctttcaggaatatggctatatcactttcagtttcttaatgaggtgactactatgttgtttttaactagtggtgtgctagagccagcttgtagagactgttaaacagccatttttaaagcagctatgatgggagtatttataccacaaaaactggcaaatgcacaaatcagtcctgcctcctttccccattcatcagcaggccactgttttttaactatttgaaaaggatgatgaatgaactacttattaaggttcttatatatgctcaccagaaagcatttctacccaaggaatgtcttgaaccactagtttcaccctcctatgaatccttcaactccttaatatgctcagtccatggacctggaagagactcccactcagcctagcctggcctgtctgttttgcttccctgactaggctgaaatcccatctgaccactctcccagcttcccttgccgatttcctcacttccacacaacctacctctgactcttcagttctctccgagcttcacatacgctctgactcttgggttagctcaccatatctactcacctctatcactctgactgcttctccccaatgaatgaccccaatacctgcttagttcagctggatcaacctaactaatctattttttttctgttcttgcttcaaagctatatacatgcttttgctctgggagaaaaactacatgagcagcttcaccttcacctgtgccttcagtcctgctcactgtctcactcctgtttgaccttgactgctttatccactcctctcttcaagctcccaccccaggcctgatcatctcactaatacttcacagagaagttattttatgtaaactccctcagtttctactccttcaaatcaatgtgtattagttgactatagctggaaaagtttctctgactttattttacaaaaacaaggaagggaggggctgggcacagtggctcatgcctgtaatcccagcactttgggaggccaaggcgggtggatcatgaggtcaagagattgagaccatcctggccaacacggtgaaaccccgtgtctactaaaaatacaaaaattagccgggcatggtggcgggcacctgtagtcccagctacttgggaggctgaggcaggagaatcagttgaatccaggaggcggaggttgcagtgagctgcgattgcgccactgcactccagtctggcgactccagcctggcgacagagcaagactccaactcaaaaaaaaaaaaaaaaaaaaaaacgaaaaacaaaaaacaaaaaagaacacagggagggaggactctgtccctcacttttgctgcatgcataaaattattccacttcccttttaccagtatgtttcttcaaacagaaatctctacccactgtctccacaactctgccacaacaatctagtgggtggtatctatgtccagcaaactgacttttgacctaactctaaaatacactggtctttttctagtgcttattctagatctttgtgctgtacctgacactgcggaccagtgtcacgttaaaatcctaccttggggccgggcgcggtggctcatgcctgtaatcccagtactttgggaggctgaggcgggcggatcacttgaggtcaggaattcgaaaccagcctggccaacaaggtgaaaccctgtctctactaaaaatacaaaaattagccgggcatggtggcgggtgcctgtaatcctagctacttgggaggctgaggcaggataatcgcttgaacccaggaggcagagtttgcagtgagctgagattgcgccactatactccagcctgggctacagagtgagactctgtctaaaaaaaaaaaaaaaaaaaaaagaaaagaaaaaaatcccatgttggtttgatgataatacttttacatggtttacccactactttggactgttcttttcagtcactctactttgagaaacaaccttttggtctccctcattctcttggctataactattactacgtgcaaataatcacccaatttatcttcagcatgacttcaacttctgctcacagtcaccttggaataaacacactgaagatttaaaaaccttctattccaaacttactcttcttcctatgttaatgatgttaccgcctactcacctgcttaactagaaacctgagacttctttttacttctaagcataaaatgattctccaatgtgcctcccttctctatgccttggtttaggtccttttatctcgaatatggattacttaatagctaacatttcctttcctggtgtgtagggctccatcttaatagagcttgaagttaccaatccccttggaggacctacttatcgagtacttcaactttatgtaagccaattacatgacaatattttatgtcttataaatacagataatgaagcaaaaagagatagaaaagggtcgagtttttccctcccaaaacccccaatgattaagaattttccatgtgtaatcatgtgtacattaactacccatagttttctcgcacaatgcatttttttcctcagcaattttctgaacagaagttcgttttagtgatcttacctaaatctaccccaagtttctcagggaggactctggggatgttctctagtaatcctccaccagtaatatgggcaaaggctttgacatgtcctgaacgtaggacaggtaacagtgaatggctgtagattctggtaggcgtgagaagtaagtcccctgcatgttgaagagagaagacaaaaacttagcctatgaatagaaaaccaaaacataaaaatcaacctggagaatgacaccagctctacaataatgaccaagtagcaaaccaaggtaattcattcccttttagctctaagtaatcagagactaaaaccactaaatgcttgctcaggcatttccaagcaggacagtttaaacatgagggagtttacctaaagtctggtcaccacaaccatcaggtgctggagaggagtactggagggaagattttgccacgattttcctcacaaggctaaatccattgctatgaagaccagatgaagctattccaacaacaacatcaccctcagtgattctttccaggtgagggagtttctgatctcgctccatggcaccaacggcaaacccagctaggtcatactctccagggggatacatgtcaggcatttctgctgtttcacctcctggtgggataagacaagaacaaagaaatcagagtatttataaatctgtctaggaaacagtggcacaggctactcttaacatgaacaactaacacatggctatgtcctgcaaatatttaagaaaatgtactctaccagctgtctaacagaactttccaccaagcatgatttcaggagaaatagcacttgtttccacaaagggtgagattaggtagcacctctacaagtatatatgcagccgccaaacaccactgcttgcacagaatgaatgctcagttgaatataacatcatttctatagctgtttagtttcaaaactgctttcatatgtatttgatctttataatcagtccatttttcaggtgatgatacagccttaaagaagtgacttaactgggactgcccaattccaaataccctagcttaaaaagtatagcattttacttacaattatatcatgtcaagatataaggtataggcagactccaaataagaaactgtgttctaaacggtggttgaaaggcaatttttgtttgtttcaaactttattcccaggcttctttagcttaattagctacaaagaataaattgtgggctgggcatcgtggctcacgcctgtaatcccagcactttgggaggccgaggcaggtggatcaggtcaggagttcgagactatcccggccaacatggcgaaactctgtctctactaaaaacacaaaaattaaccaggtgtggtggcttatgcctgtaatcccagctacttgggaggatgaggcaggagaattgcttgaacctgggaggtgggggttgcagcgagccgagattgtgccactgcactccagcctgggtcacagagcaagactccatctcaaaaagaaaaaaaaaaaagaagaaattgtgtataagcaaaaactgaaaagagctgcagtgtccaacaggaatggggcttaaaatattagagatctaaattttatcagatccataaacaatttcagaaagcagtcataatgtaaaatagcagctcctagttacttcatattttttcttcttcagaagttgactcaattcagtttgcctcattcttaatagcctcatcaaaactccttacaagatctagaacttcatcaccatcccctccattagcaagcagtgcttttccatccacagactatttgggcagagcttcagtcggtctccttaaactagtcagattgtctgcaccaagctggtttaagatgctggtagcatttctatcagctgcgttgtctcagcatggcctgtaatggtgaaagtgttcactgccccagagaaatgctaccagcattttaggttgttaaagtggatctctggtcttcatttgtaaacatactcaccccttcaataccagagatattgtttacccttaacttcttaaggagaactgaagtttttatcatctgctgtagctgaaccaccttctttctgtttcttttccatcattacgcaattgtgcctgcaatttggttgtttctttcatcttgtcagcgtggaaaagggtcatgtggaggactagggttggtgctcaaggggtcctgggtagaccagctgagattagatgcacacatgtgcagatgcaagatggcacaatttctggtttaaatggtcatataaaagaggcagtttctggccgggcacggtggctcatgcctgtaatcccagcactttgggaggccgaggcaggcagatcacgagatcaggagattgagaccatcctggctaacacggtgaaaccccatctctactgaaaaatagaaaaaattagccgggtgtggtggcgggcacctgtagtcccagctactcgggaggctgaggcaggagaatggtgtgaacccaggaggcagagcttgcagtgagccaagattgcgccactgcactccagactgcgtgacagagcaagactctgtttaaaaaaaaaaaaaaaaaaagaggcagtgtctttgggaggctgtgatgggaagatagcttgagcccagcaattcaagaccagcctgggcaacatggcaaaaccctatctctacaaaaagtacaaaaattagctgggttggtgacacatgcctgtagttcccaactacttgggaggctgaagcaggaggatcccttgaacccaggaggtcaaggctgcagtgagctgtgattgaaccactgcactccaacctgggtgacagagagagattcccttttttttttttttaaattaaaaaaagaggttattttgttccttgatcaacctacagattcattttgctcaaacatttcatgtataaagatacttctataaaacttgggcgtatattattatttatgtcactctatgggaaaatttggctttagttaagatccggaatgccaggaacccatctgcctgtaccgtggggtcaataaggaggaaataactcctagacctgtttgttgaggaggctactgagactgatggggatgttaaaaggtggccaaaaattgggaagaaagataaggcctgcctgacagtttgggagtacgggtctagaggacaaacccctgaggagggctttgaaggtagcaggctctaaatttaattcaggtagttttacctatatttcatttgtgcatatcacatatatgcatcttgtgatatacagtctctcttgctagctacattggcactgatcacatttttacatagggctaaaacacaaaaagaagaatgacatgttattgattaaaatggctgatcataccaaggagagcacatccagcttttccacaagctttagcaattccagcaacaacagcttcagttacactgaggtcaagttttccacaggaaaagtaatcaaggaagaagaggggctctgctccttgtgccagaatatcattaacacacattgctaccaaatcttgaccaatggtatcatgtttattgcatagctgggcaatctatgtaagaacaatataaacatccacattagggaataagttcaaaattgtatcttatccatttgattagctgctcttaacacctaaaaacaaaagaacacgaaattctgacaagctacttggtctaaaagcatccccttttatcctctaaagtacccttccatccaaatataatctaaataataatttgttattagaaatgtgcagatattttagccattttacatggttatttggcatggtcctttttagctcatatatgtcaagagaagaaaaatacatatttgatataaatttcctcatctttcctaaaaggcctttattcacaaaggtgtctgattacctttagtttagttccaacgccatctgttccagaggccagaaggggatctttgaaaccagctgcttttaaatcaaaaagaccagcaaaacctccaagatcaactttacagcctgttggagaggaaattaattacttgctacattttaatagattaaacatgtaattatttaaatgtctactagtttaaaaaaaccagtatatttagcggcctgtgagatgtacttctggaagaaatagatgattggaacagctgttctcagagatgacataatcaaatcaactgggagaatgtaatcatttaatagattaacatgtaacatgttaataggttaaacatgtatatacataccacttgttcataagaatggctgaaacaagagatgcccttcctgagtatgagagattgcaccatgtgctcaaagaattgattaagaaagtaattaaggctgggcgtggtggctcacccctgtaatcccagcactttgggaggccgaggcgggtggatcacaaggtcaggagatcgagaccatcctggttaacacagtgaaaccccgtctctactaaaaatacaaaaaaattagctgggcgtggtggcgggcacctgtagtcccagctactcgggaggctgaggcaggagaatggcgtgaatgcaggaggcagagcttgcagctagccgaaatggcaccactgcactccagcctgggcgacagagccagactttgtctcaaaaaaaaaaaaaaaaaaaaaggaagtaattaaatactaaaggaccagccagacatggtggctcatgcctataatcccagcactttgggaggctgaggtgggcagattgcctgaggtcaggagttcaagaccagcttggccaacatggtgaaatcatgtctctacaaaaatacaaaaattagccaggcatgatggtgggtgcctataatcccaattacttgggagactgaggcaggagaatcgcttgaaatcaggatgcagaggttgcagtgagccgagatggtgccattgcactccagcctgggcaagactcttgtctcaaaaaaaaaaaaaaaaaaagtaaaggagcatacatatccttttgagtttaacatgacagatgagaaatactttaatattaaagaaaagaaagcagaagactgggtttggcttaagcagggcaaaacttacagtaaccaagcattgctttggaaaatattcctgttaaatataaaacccaaatccattcacaatgtatatcaaagttaatgaattagcaaagtataggatcactgacctgatctggaagtggcttttgctaaaggctgaattttcttgaccagcatatttccagctgcgatatctactccagattccttgtaagtcaaactcctaaagaattaaaaacaagtcatcacctaaacgtcagggaaaattattttaatcttaaaatattatttaaagcagaagatatcccaagtgattttcacataccctaaagtgcttaaatttttttaaagtcagtgcctgggccacatctatacagattctgatttaactggtctagggcaggctctgggaattgaaatgagtttgaaccatctccccagttgacttgattacatcatccctgagaaccgctattctaactcaatcacctatttcttctacaagtacttctcacaggctgctaaatatactgattcttttaaatgattttttattaaggtagaatatacacaacataaaattcagcatcttaaccatttttaagtgaacagttcaatagtattgaatacaattataatgctgtgcacccggcaccatcatccatctccataatcctttatcttgtaaaactgaacgtctgtcccagttaaataactccccattccccactaccccagaccctggcaaccatctgtttaaaagtagatatactgacattttgctgcaacttttctcagttcaattttggtatgaacaagagaggaatgcctaatcaagtcaaaaaagtgaaaattagatttgtaaaaaccgtacacaagtatccctaaataattaaactgagttcttaatttcagtaatatataactgtatctgtttcctaatagctgaggacagtaaacactatgacaaaagcaaaaccaggtaaagatactcagtgcatcatttccttctgtataggacccacaagtcggagcagtacatttagagatcaaatttttgaatgacactgcagattttgtagtcttgacttgcaaaaatgagaactctggcctgctgggatgcagtgatacatgaagaaatatgtgtttttatagaagtgtctttaaaaaaagcatacaaaaacaaaaaacaaaaaagctgccagaatacagttgagtgcattggcagttaactcaaataaagccagcagctctgggtcactctcagatagaaaacaaagactgatgttaaaaaaccttttctccagtagcaactaacactgtggcatttccattttttcatctttataacttaaataattcagactagaattgagattgcagtcccttgaaataggtcatttcaatggaatctagtcatttttaaatgaaaaataaatttttagcctggtattttgatgttcttgattcttggaaaatctgtgtttaaactttaaaaaaacctgcctcttggtaacagtatagcttgaattacgttggtaaaaaaattttgtcttaaaatttattcattatccgtaaatgaacttcacgaacaatagcaaatgtgatatatttttaagaaatcaggccgggcacggtggctcacgcctgtaatcccagtacttggtgaggctgaggcaggcagatcacctgaggtcaggagttcgagaccagcccggccaacatggtgaaaccccatgtctaccaaaaacacaaaaattagctgggcacggtggcaggcacctgtaatcccagctactcaggaggctgaggaaggggaatcacttgaacccgggaggtggaggttgcagtgaggcgagatcatgccactgcactccagcctgggcgacaagagcaaaattctgtctcaaaaaaaaaaaaaaaaaaaaaaagaaatcaaaacacccacatttccaactaagactttattgattttacaagtcaacagtttgtacataccaacaatgaatcagtaagaggtcaaaaaatacattttagtaatagatacaaacgcagtgataaaatgagactgtcaaactttacagtataatcaaatcaaattacaaagttagatgaccagtattctcatcttcagttctttgataaaaccatgaactatgtttcaaatacaacactatgtgataacgcaaggaataaaaatcagtatcaggccaagtgcagcggctcatgcctataatcccagcattttgggaggccaaagcaggaggatcacttgagcccaggatttcagactggccttggcaacatggtgaaaccccatctccacaaaaaatacaaaaaaattagccaggtgtggtggcctgtgcctgtagtcccagctatttgggaggctgaggcatgagaacttgggcgagagaggaagaccctgttaaaaaaattaaaaatataaaataaaaaaaatagaaaacaaataaaaatcagtaccactgtgattttgctaaactttccaaacttacgctatcatgaagttttttccatttgagtattgctataaccagttttgattcaaacaaaatacaaaccaagactgtatcactcccacagagagaaaagaatactgaatgacttatagggttaatgaaatgttctacatagccatttaggccagtttctgaaatggcactacagctaacttgcttagagttttacctgggctgctggaggaaagctatggcacgaaagccgacgtctttcctataaattgctccctcaaactttatagcagctagtcctttcttggcttcctcaagggctgatatgagattttcccggatggctgtgactgcaagaactctacccccatgagttactactttgccatttttgagggcagtgcctgcatggaacacctccagtcctagagcttgagcctcaggaaaccctagaagagagcatatttgacatatgatttcaaatagcaacagtatttcacaccgtgaagtgatttacgatttccacaagtttctttttttttttttttaacttggctaggtgcggtggctcatgcttataattccagcactttgggaggctgaggcaaggactgcttgagtccatgagttcgagaccagcctgggcaacagagcaagacctcgcctctacataaataaataaataaataaataataatagccaagtgtggcggcacacaccagctgaggtgggaggatcacttgaatttgggagtttgaggctgcagtgaggtgtgatcgcaccactgctccaaacccagcaacagagaccctgtctccaaataaataaatacataaaaattaaagatctttctctcacttaaaagaaccttccctatcagacaggtcttcttttattttttgagacggagtctcactctgttgccaagctagtagtggtgtgatctccgctcactgcaacctctgcctcctgggttcaagcaattctcttgcctcaacctcaggagtagctgggactacaggaatgtgccaccacacccagctaatttttgtatttttagtagagacggggtttgaaaatgttggccaggatggtcttgacctcctgatctgcccgccttggcctcccagataggttttaatgcaatgtaatagtaattagacctttctcctaagaactgtctgctattttaggatgacaacctaaattcttgtgttatcgtaaatctcattataaaagcaattgtttaatgaggaaagaaacaaaaatcctgcatctgatcacattaatcttttccttaagagtaagggaacttccttttttttttttttttttgagacagagtctcgctctgtcgcccaggctggtgtgcagtggtgcaatcttggctcactgcaagctcctcctcccaggttcacgccattctcctgcctcagcctcctgagtagctgggactacaggtgcccaccaccatgcccggctaattttttgtatttttagtagagacagggtttcaccgtgttagccaggatggtctcgatctcctgaccttgcgatctgcctgcctgggcctcccaaagtgctgggattagtcatgagccactgcgcccagccgggaacttccttttctttttgggacagagtcttgctctgtcacctaggctggagtgtgcagttgtgcgacctcggctcactgcaacctctacctcctgggttcaagccatcctgccacctcagcctcctgagtagctaggattataggcatgcaccaccacatttggctaattgtttttgtatttttagtggagacggggtttcaccatgttggccaggctggtctcgaactcctgacctcaagtgatctgcccgcttcggcctccccaagtgttaggattacaggtgtgagccaccgtgcctggcctgtaaaggaacttcttttcatcacagttattcaattaaagctgcttctttttttctttttcgattttttttttttaaccagatcatgagacttaagtttctttcttttcagtataaccaatatgatcagtacaatgcaaaacataagtaatcttttcactattataacacttgtatgattttaagacaaacttggcttaaattaagttttggggtcagccccaaattcctgccccttcactgtattttgaattatttttaaactctcagatacagctttatagttaaaacattattagactatatattctaaattctaaagtgaccaaaggggacagtttatgtaaagataacactttttcttaatttttagaaaaccattctttcatctcctggtggtcttctttttccgtctctatttcttttgttagcatcctatttggtagtttgttaatatacatcttccctgagtgtttttacaacacaaagccatttagtgattctgaatggctactctgcctgccagtactggtaaaactcaatattgctctggcagaactattatacacttgttacttcaatcttagggaaattttaccaatgcaagggatcttggttctggcccatttctttctttgtccatattcaaaaggaatcaattcttaactgcctgcctagctgccatgcgtgggattcataaggcaatggacttggtgtctgggcaagacagtttatggggttgttgaattaaatacactactggaggctgggcatggtggctcagacctgtaatcccaatacttgaggaggatgaggtaggcggatcacttgaggtcaggagttcgagaccagccgggccaacatggtgaaaccccatctctactaaaaatacagaaattagctgggcctggtagcatacacctgtaatccagttacttgggaggctgagtcagaagaatcgcttgaacccaggaggaggttacagtgagccgagatcgtgccactgcaatccagcctgggtgacagagctagagtctatctcgaaaaaaaaaggaaaccccccaaatacactactggagcacggagagtggccaaactataggctgctaggggtcacagaggtctgcctttggacttacggcactggaacttagatttaacatcatttaacgagatgtttcacctactttatataaagagagagagaaaaaaaagagaaggataaactttgaaactgtttgaattttgccatccaagtgactatggggtgcactgtaaactgggggtcaaaccacacaaaactgtatgcatttgtgataattcagagtcctcacctctaaaatatatcttattgatatactttgtactaatgttcctctgactctcagagaatctcattattaccctggctctaggcaggtggaagtggaaggctgcactgggtgacactcgggagatgtggttctgccacttatgtcttccttgcacaggaagggaaatcaacggttctctgaatacagtaattgcggatatttgaacacacatatccaataagcaacatggttaagaccctctgaaaggtttctgatggcttcacactcttatcgagagcaagccttagtgtgagaggggggtctgctgtggtgctggcacttgtcacgttgtactccaacctcttgctccctgacactcacctgttatctctacacccttggtgtagtctccaggataacctttacttgccatgacaacagttagggcggtgtggttttctagccaaacaggcagagatgtgcagagcagtccatctaaggtggactgaatcacttcataaagatcacttttaagaagtgggaggattacctggaaaaacataatccacatggcaggtgggataaattttagttttccttaaacattttattcactggtgtactagcagaacttgcatgaatttcccaaaggtaattacttccaggctgataaattccaagattaaaataccacatatcttctaccaagtaatactttgatatttttacccacttggcactctggatcaccaaaacggcaattaaactctagaacttttgggccattcttggtcagcattattccagcatagagaataccttcattaaaaaagaaaaaaaaaaaaaagagagaaagaaaatctatgatgaagacactgtattacaaatataaaatctactacataaacttctaataatcaaagttttggaaaaatcataaacatttaaaaaatggtccattaaaaagtggtaaaaaaaaaaaaaaaagggaatggaaaataagttttatcaaaagtagaaagttactctataggtggcttccatagtaatgtgggtgggcctacctgtatatggagtaccctcttgctgcatgccatccactgtcctctgaagaacagtatctttaatttttagtaatagatcattagaaacctggagaacgtgcagaaacagttaaatgtaacaggtaacttaaaaagtctaagtagtattacatgggacaacagaaggggatgatgaggataactcatttttttactacctgaaacatgctgaacactttgaacttgaaagatttaaactttctcaatcctcacaatgactctgtcaagtaggtattttagctttatgattttcaaaaaatacactcttaaaagaactagccaaaaataacttcccgaaacgtaatagaaatgaaacaagttctctcctaccctaaggcttctttgtactcttcccagtatacgctgcatatttcataagtctatatatgtaagattctgggtttatgaatttaattgtaaaaattagacccagatatagttcttagaatacactattaccaaatggtagttttaatacaagtgtttggattacaggtgtgaaccactgtgcctggcctacacttatgaagtcttttaaaaaaaatgaagtttatgtttaatctttttttttttttttttttgaggtgaagtttcacttttgttgtccaggctggagtgcaatggcgcaatcttggctcaccacaacctccgcctcccgggttcaagtgattctcttaccttagcttcccaagtagctgggactgggactacaggcatgtgccatcgcgcccagctaatttttgtattttcagtagagacggggtttctccatgttggccaggctggtctcaaactcccgacctcaggttatccacctgcctcggcctcccaaagtgctgggattacaggcatgagccactgcgcctggcctatttttaatcttttaagcaagaaaaatatgtaaaggggcactacattagcacaaacattatgactatcttcaatgaaaagaataggtgagttttcggattgttaacctacttatatgccaacagcacaaattcctaaaaaaaactgtgcagaaggccaggcatggtagctcacgcctgtaatcccagcactttgggaggccgaggtgggcagatcacgggtcaagagatccagaccatactggccaacatggtgaaaccccatctctactaaaaatacaaaaattagcctggcgtggtggcctgtgcctgtagtcccagctacttgtgaggctgaggcaggagaatcacttgaacccaggaggtggaggatgtagtgagccaagatcgtgccactgcaccccagcctggtaacagagcgagactccgtctcaaaaaacaacaacaaaaacaaaaactgtgccgaaattgtttggaaacgtgttgtctgttatgaagtagaaagatcagaacaaattctgatctgacttggttctcaattcatatcacacacacacaagaaattctgatctgacttggttctcaattcatatcacacgcacactagaaattctgatgtgacttggttctcaattcatatcacacacacacacagatacacacagacaacacttttgtgctgaaccacggatatccaaagatgaatccaagaccacgacaggctcccatgtgttaaaaattggctgcagagaggagggaataggaggatctattcaacccatactatactttagattggcttattttagttcttcaaaaaaggcttttaggaaaagttagttttagagaccagaaaagatactcctcatttaattgctgattagtaacataattcatagcaacaaacaaacagaaaacaaaacaaaatagaaagtatcatctaagagttctctgagaaaaccaaactactacaagacttcagcagagtcttcgggaagtacctgaggggctggacaataggctcccattccccctgtgttagggccaccatctccctccagtaatcgcttatggtcctgtgctgggggcatgggggccacagtcttgccatcagtgaaacacagacactataaagaaaacaaaatagtccatttatgttaactgtcaaaaactaaaaaaaaaaatttagtgaggcaaactatatgtcccttaattcttctttgaggaaaagtttgtttttttttttgcagagaaatgaaccgaaacgtcaataacattaagctacatacatcaagaatcataatgtactcaacttctgaaggatttgtaatttttgagggaagtcagaaaaaatcaagctactctcaaagtaaaagatttcaacctttcccccactttaagcttccaggcattaaaacttggtttaaggtgactttatttattgtgcaataaactgtatatgaaagaaaaagcatgaatgcttgaattaatccagaacctcaatagtgtgtaagtccaagtgcccccactaacacactagggatgactaacagaggatcgattattttttcatttgcacccccaacaataaaagtatacaaattcctttgtaactgctgggtttatgtttttagatgaagcaaccagagtatatcaagtcttttctggggtacacaggtcagatgacagcttcttatacactacaaaagccaaaaagatgaatatacataccgacacctcttctccgtcaagaagttcttcaatgacaattgtttctccagctgccccaaaggctttctcctgattgtaagattttttttttttttttttttaaaaaaagaggcttggtaagtttttgatacttagttgacttttagcattatccagcatttgtattatgaaccagtgagtactgtaatttttctttccctttcagaaagactcaaagggaacatataaatgtttcctatttttaatgtggcaatagtgtagctaacactggtacagacggaataaacacacctctaatattctcctgaagatttggtgatccagtttcaaataaggtatgggaaaaacagatgttttcattatcgccacttaatccttacttccgattataattatacatgtttggctgtaataactatactaaagcatgcttgtgaaagtagacttctacaaggacagaaaacccacaacaacaaagatcgatcacgaaagacaaggcatattcattcattaatttacttctcttagacccgggacatgtgggacaaatacttttgtcctcatggatggcttgataatttatttatatgttctagagtctgaggattttctttcagtggcagacaacaaaggatgttacaatttacttcaaaataatacaatcatggtttaatttacagtgtaaatccataactattttatagagatggattataatacatgggattataaaaaataacttacccatatgtttgcaaaatagattttccttattgtgaggaacattttttaaacttaaaacggtatttattcagtatgaatagaaaagtaaattttttcagaagacccagcctacctgcatgatctcttgtacagctttgcaggcctcttctttgctctttgcaacaatcaccccttttccagctgcaagaccactggccttcacaaccaaagcagggaagtctgcactgtaaagacagagtaatcgtcaacatccaataaaccattacaactcaagattttaaaatgctgtgggattttgtaacgatatgctatagcaatgactgaaaagcagaaagaaaaaaattaattatcattccaacacattttgatgtacttcccaccaggattttttcccctacgtattcctttgtagttccaatcatacagtacctacaattttgcttttttcatttatcatgagattacataggcaatatctttggaagaataagtagatgtatagagtagatatggcataatctctaagatacaaagtagcaaatagtactctcattcaggtagaaaatgcggctgtataacaacagtaagcatacacagaccatttctgggagtacacatatgaaattatcaagtgggcctgggggtctggaaggagacttacccaaagtaagtaacaaaactgttacttgctcaaggcatctggctgctaggaaataataatattcagtgtttaagaaactctttaggatatgaatgaaaaaaaaatgaaactgacacaactgaaaggaaaacataaccaggaagcagaagtgccaacaaaaaaagggcaaatgcatgtgtctactaacactcattaattgctcaatgctttccacataatagagaacaaaggatgtttaattttgaaatttaaaattgcaatagtggccaggcgcggtggctcacgcctgtaatcccagcactttgggaggccgaggcgggcggatcacgaggtcaggagatcgagaccatcctggctaacacagtgaaaccccgtctcttctaaaaatacaaaaaattagcctggagtggtggtgggcgcctgtattcccagctactcgggaggctgaagcagcagaatggcatgaacctgggaggcggagcttgcagtgagccgagatagagatagcgccactgcagtccggcctgggtgaaagaacgagactcaaaaaaaaaaaaataaataaataaataaaaataaaaataaataaataaataaataaaataaaatggcaatagtggtggcagatgaccaagtgatgattactcactctggttaattatttatgacaaaaaaaatcaatgttctttatgttgtaagatgccactgcgtttgtcaatctgaccgtgaggcctagtgttacggctcatgcctgtaatcccagcactttgggaggcagagagaggcggatctcttgagcttaagagtttgagaccggcctgggaaacatggtaaaactccgtctctacaaaaaatataaaaactagctgggagtagtggtgtgtgcctattgtcccagctacttgggaggctgaggtgggaggatcacttgagtccaggaagcagaggctgctgtgagccaagatcacgccactgcactccagcctgggtgacagagagaggccccgtctcaggttggggggtggtggtggggggcggggaaccaaaaaccaaaaacatggctgtgaagagcgcacaactgcagaaccaagtgtatttttcccctgaggaactactcagattttattaaaaatgtcatcttcctgcaaggccacaagatcatataaactctgtatgcataggatcccattttattttggttctggaaaacgacaacccacataatatttattgagaaagttttttccttaattatcttactacatcttgagacagcctaaagacctagcattacattttcaacacagaagtgacctgtatatttatttaatttttttgagacagggtctcactctgtcacccaggctgcagtgcagtggcacaatcttggctcagtgcagcctccgcctcctgggttcaagtgatcctcccaccttggcctttagaggagctgggactacaggtgcacaccatcatgcccggcttttttttttctgtattttttgtagagacagggttttaccatggtacccaggctggtctctaactcctgagctcaagtgattcacctgccttggcctcccaaagtgctgggattacaggtgagctactgtgcctggccactgacctgtgtatttaaatatcaaaactaaacaactgtccttcacagacaaccatttacctacctcaaaatgaagctgcaggcttcttcaggtttggtgaaagccttccattgtgcggttgggattccatgtctgtccataaactctttggcaaaccttttgctggactctaactgagccgcttctgctgttgggccaaagcattgcactcctgcagacctcaggttcccaacaatccctattgatgaaaacagtagccttaggtgaaccaaggtctccccaggggcttttcagcctgaagacgaattagtatcagactatatctacatctagacaaggcagatgactggtggcagaggataactaactttttcatgttgtctactggatagagataaaatgctattaacatgttattcaaatctatcaaaagttgttatatttgcatatatggattattaaacacacaccagaatacagcagaataaagacatataaaatgttttccatggctgcaaatttgatctctaactcatcatataactgatgcttgggaaaaaaaatctagactccataaatttcgagagtggaagctctttttccaagataatattacaaattctcatctgtaaaatgaattggattagatgatccctaagcttctgtttgcactgaatatactgtaacaataaacagaaacaaactttaccagcagccagaggtgcttctggtccaacaactacaaattcaattttcttctctttgcagaattgagcaagggcagtgtggtcactgattgagatggctgtaaacagaaaaaaaaaaaaaaaaaccactgcatttacaaaaacattccacttaagtaaactaagtgtctcactaaaaaaactaagttctatactttagtatgcttgttatctgttggttttcttatattggcagagatgacagtttcaacatgtgaaattcagaggagagtgcattaggctaaccaacagagctcagttctccgttatcattgtagacagatgaaaacaccaataaacttcccaaagagccataaagtatcacctccatgatattgttcacgtcactaatattgactgtatattaaacaaaaaacgtaagatatactcagaaattggtcttttaatgtcaatcaatcaattgtactgaaaatccactatgtgctaagtactgtcctcagcactggtattaagatgtcaacacggcggggcgcggtggctcacgcctgtaatcccagcactttgggaggccgaggtgggtggatcacctaaggtcaggagttcgagaccagcctgaacaatatgatgaaaccccgtctctactaaaaatacaaaaagtagctgggtgtgggggcatgcacctgtaatcccaactactcaggaggctgagacaggagaatcgcttgaactggggaggcggaggttgcagtgagccaagatcgcaccactgcactccagcctgggtagataacaagaacgaaactctgtctcaaaaaaaaaaaaatttatcaacacaagcagggtccctatacttaacatgtttacaatacgctgtaggaacgctgggtaataaacatacaaacaaaaaaacagcaaatatgaacaaattaagcaaatttgatatgaagtgaattgagaggctattttgggttgggtcaggagggatctctttggggcagagctgtttaagttaagaactcaatgacgcttttaagaggaacctgtcttctccaacctgcaagtcaggtaaattttcttctgtggagttctaagtaactagtggtaggatcaaccacatactgaacatggtttggctccataggggctctcctgcttcactgtgcctggaccaccattcgttaagtcagctgaagtgtgcaatcactctgccattggtacagagtacaagaagtgatatttgtgatgtacagttgtccctctttatccttagaggacacattctaagatccctagtggatgcctgaaaccacagtgctgaacgctatatatatagtatgttttttcctatacataaacacctatgataaagtttaatttacaaattaggcacagtaagagattaactatcactaatactaaaatagaacaattataactatatgccagcatcagctttggggccattattaagtaaaacagggttacctgaacacatgcactgagataatatgatagtcaatctgataaccaacagggctagtaagtaacaacatggatatgctggacaaaaagattcacgtctcaggttggacggcacaaaatttcatcatgctatgctagactggtgtgcaatgtaaaatttatgaattatttctgaaattttccatttaatattttggactacagctgactgtgggtaactgaaactgtggaaagtaaaattgtggataggctggtgactactgtatagggtccaagtccagaaaaggtagggtcctcaatctgcagcaactgcctgaatgtgattaggatggagtaccacgcactgtgggttagtggttctgaacacaactaggctgagcagcgtcaactatatcagtatagcagagggcaacaagaggaagaggtctctttagtagtcttacaagactacttgtagtagtctcatgatgatcttaagagattttgatgggcttgcctgtatgacctcaatcgcagataaactgtcctagttctctaataaacaaatatctcacccgtagaattaagatcccagaaaaggaggtatttgctaatttgtattattccttttggtcttatatacatgccactatcttctcccagtttgtggcttgttgggtccatgctcttctttccataaatattatgtgccacatagggaactaagcactgtgcacaccatgcaaaacaagacagacaagttccttgccctcatggagcttacattctactagagattatattctagtggaggaaaagaacatagaagacagacaatagtgaagtaaaaataaacacagacattcatgatcataaacaaatgaaatggggatggacacttgcttttagtaagaaactgtaggagagatataattaaggaggctaacatttaagtggagctctgaataatgaggagacagtcatagtaaggggtgggaacaaatataaagtccaaagcagcaagcttctgcttgggaaattggtaggacagcatggatagggtatagtgaaaagagaaaaagggatataaaagatcaggctggaagagcaggcagaagacagactgcacaaagggctttgaaaggcatggtaaggaatttgagttttattctgagtattattagaatactgaggagtttctgaagccactgacaagcttaatgtagtatatgaactgaccattttttcatttttgccaattgagagataagggtggaggctgggcacggtggctcatgcctgtaatcccagcactttgggaggctgaggcgggcagatcacctgaggtcaggagtttgagaccagcctgaccaacatagtgaaacccggtctctactaaaaaaacaaaaaattagctgggtgtggcggcatgcacctgtagtaccagctactcgggaggctgaggcagaagaatcgctttaactcaggagccagaggttgcagtgagctgagatcacgctactgcactccagtatgggtgagagtgagactctgtctcaaaaaaaaaaaaaaaaaaaaagtcagagagagataagggttgagatctattagagtaacaactgttaaaaactttgttttgtgagacaggttctcatcttactctgttgcccaagtagctggcactacagatgtgcaccaccatgcctggctaatttttgtattttttttttgtagagatcgggtctcactacattgccctggctagtctcaaactgctgggctcaagagatccttctgccttggcttcccaaagtgctgggattgtaagcgtgagccactgcacgtggccgcaagttgtatttaatagcaatactaaactttccatttacaaaaatacacaacaaaatgcctttaatctgtattaggcacttactacttttccaatggatgtgttttatcaggtttaaaacagtttaagataaggaaatgccatattctgaacaataggttaccttaagtttataacatattggcaagcattcaaattaccaaataaattttaaggtcaaggaaagcactcaaccctgaatagtagtctatattttattttattttgagatggagtctcattctgtcgcccaggctggagtgcagtggcatgatgtcagcttactacaagctccaccccctgggttcaagccattctcctgcctcagcctcccgagtagctgggactacaggcacccgccaccacgcccggctaattttttgtatttttagtaaagacggggtttcaccatgttagccaggatggtctccatctcctgacctcatgatccgcatatctcggcctcccaaagtgctgggattacaggcattagccactgtgcccagcctatctttattaacataaagtacagatatggttgacagcataccattaataacaaataataactattactccccactttaaaacatgattaccggtatttgaaatcttttcagagcaggcagtgcctgcgtttcctggggcaaccaacacttgtttgacatgatgagactgtgcaagtttccaggccagcgtatgttcccttcctccactgccaattataagtactcgggctgccattgttctgtctgtaaagcagaaattccaaaggaaaatgaaacctgcagaaagaaaaccacagtttatatcttaggatgcacattttagaaacccagggacgggcacagtggctcatgcctgtacccccagcattttgggaggccgaggcaggtggatcacttgaggtcaggagtttgagaccagccttggccaacatggcaaaacctcatctctactaaaatacaaaaattagccaggcatggtggcgggtgcctgtaatcccaggtactcaggaggccaaggcaggagaattgcttgaacctggtaggaggagatcgcagtgagccaggatcacgtcactacactctagcctgggaaacagagcaagaccatctcaaaaaaaaaaaagaaatccagatttgtaaatataatttaagtaatcatttgtactcatacaaatgacattttcatccaatgattcatttttgaaaaactgggattcataatttgagaaatatgactgtcgtcataagcataagggaggtatttcaaaaagaaggcaggctggcctagagagctaggttaaggagtcaaacgatgactctcagctccttatgtgataatctcccttctctgggcttcacttcaaaaagatttaataatcatcatgccttagttatgaaatgaatcttgttttagactcaaaatgtattataaaatatcaatttttaaaccttgaaatcttacagataattaggttatcataaattaaaggatatactgaaaactggggtaagcaaactttacacaaaaagggccacatagttctgtcaaaactactcgactcggccaccttagcaggaaagcaaccaaagataatacgaagatgaatcaatgtgccaatgtccagaaaaatttaatggacccataaacaggcagtgggtcagagatcactgttgcctatcagtactttaagtagcaggaaaccatcaaaggtttgtaacaaataaacgtgactcgctttcaataaaactttatgtacggatactataatttgaatttcataaaattttcacatgtcacaaaaacctcatttatttcctgttctttttctcaatcattcatatttggtgagctgtacaaaagcaggcagcagaaggatttggtatgtgggccatagtttgctgactcctaattcaaatagcgcaatatgctagaatattggtagagaaggcaaaaatcaaattccaactcatttcactttagttctggcacctgagacttagaaggatggatacaacagcagtgtaacctaggagattaactgaaatgacatttataaataagtacaatctggcactcagcagtagtaaatgttaacttgttacatttacttaccacaagacaaactggtaacaggaaaaagaaaattgaaaacttattttgatgatgttgggattacatattttaagaaaaatgtaagctgacaatatacaaaactaacatttttttgagcacttaaccttgggcagggtactatttaaaatgcttgtcatgaaagaatcctatgagggagatactattactatcaccaatttgcagataagacaaggaggcccagataggtaaataacttgctggaggtcacacaggtaagagggggtggagcctaacagaagcaattttgcttcagattctctcaacaagtgaaacgatgatcattgaaaatttgagaaaggaaaaaaaaaaaccctgttaaattacagtctcggaaggaacagctactttagtgtaacgggaaaacacattttacttgccatgtgtatctgaaataaacagattttttattttatttatttatttatttgtttagacagtctctctctgtcgcccaggctggagggcagtggtgtgatctcagctcactacaacctccgcctcccgggttcaagcgattctcttgcctcacagcctcccaagtagctgggattacgggcgtgcgccgccacgccaggcgaatttttgtatttttagtagcgacggggtttcactacgttggccaggctggtctcgaactcctgacctccaatggtcaacccaccttggcctcccaagtgctgggattacatcacatccggccagaaataaacagatctttaaatctagagcaaatgttacatctttagtttgaatatagcagtagtgtgggaaaattctgtttactctagtggatcactgaaaatagccttactacccagtggtgaggacgcctgggctcctgagtctcacacagcgccttggcctgggtagagacgctgccccatactagcaggaagaccttgggggacttcactaaccttgggcctcattcctcagaatgggtaacataagcagaataagacaggcaaataaagccgtatcagaggatatggagaataaagtagaaaccaactacaaaattaaccaagtaatctgccagagacaacgggtgcataaagagaaagtacaccaatttagggttatgtcctaaaaatgtataaagacacaaaaaggccttgacatcttagaaaacaggaaaagtaaaagagcaaatagaaaccagctaacagtagcaagtgaaaagcacatggccaacccccacccaccgcatttacaaacaacaggaaaatttctacaaatcagtttctatggtttcactcagttcgcgatcttaaatccccaaaccaaagcctaagcgcgctccgtgtaaaagcggagggggtttacgcaccgacaccgggtggccacctggttcccgcttgcccgctcgccggaagtcggcccaccgggaccggcgcgggaccagcgcggcaccgcccctcactgccccgccctacgacggcttccctgccccattggtccgcgcggccctgggtctccgcggcgagaatctagtctgattccctcccgccctgggcgctgcctgactgctccccagccgagacacccaagccttagcacgtttataatgtgacagtggtacggggtgccacgcagtgtttccaggagcgccgggggggagcgccaaaatgctaaacccattcttagccaattgtgcgccgctcacgagtcagagctgagcagctaccgcggaaaaatctcgtgacacgcctgactcctgatgagactaaaatgcaccgggctttgaatgccggtcgcttaggacatccggcctattgctaaaaaaaaaaatgaggctggttatagaacgcactggggaagacacagggcaacagcgagttcctcctctcacatgccagtgggggcgggggctgaaaaattctctcccggatgcatatccctgtcgaaactgaacttggcgccacctgagagcgcctgaaagccgtgtgttaaacaccgggttgcccttcttgctcttcttcctcttcgcctttaatctcaggcacttagcaagcctgttaaggctcccaaacactgctggggactgacaacttatgcggacacggtcgcctcaagagagacggctcctgtaatggcgcctgcgtcagacactaacatggcggacatagtcgtgcgcggcgcaaacgtcagcacctctaccccagccgctcagaaacagcagaggagagcagggccgtgctcactgattggtccctcggtggagcgggccggaccgggcattccctttggagccaatcaggaaggcgagagaccgaattggcccgtgcgcctcctcccgaggcatgctgggagcctggaggactagcgaggaggagttgagagaacggagcggacgccatggcgaccaacatcgagcagatttttaggtctttcgtggtcagtaaattccgggaaattcaacaggagctttccaggtaaacgcctcccagattcttctgctcccaacggaccgttaggccctcacctagccttctttggcacctttcttcggagacgcagtcgttccccggctcaggccccgctagggccccgcctgggcctgggatccattttccgggccccccccaaccgcccccccagccgctcccttccttttccctcgaggaacttcgccttttccgaggtaacccaagactccctgtttcagaaccgagttaagatgttcacccttctcccctgtttgggtcccccctgccgtttagctactcgtaggcccggttgtccgccagggacgggcctagttccttcctcagctcctcctccgccgccgcgtatcccctccccctctcgcctccgcggattttgccggccggtgcctatgaccggaaagggtctctaacggccgtttcttggttaatcttaaatcctctttattattgcgagcttcagaccgcttgggggtctggatctattaataagattattcggggcctagtgtcctgtagtatctgtcagccgttctgatagttaaatgtttcaattaaaacgaactcaaactgatgcacttgctagtttgttaaaatactcgagataaagatggaaggggactttgaaatggttgcgattaattacagcaagtgaaagtggactttgtgtgtaggtctattattttcttgctacccctgccccagttgacacgctatttttgtcattgctggtagactttacataatttgcgcttggcttcacaaaatttgaaggcgaagagattgttaaagaaatggttgtttacttaggaaaatagtgtgtcatgttcagcggttgtctctcgatatttgcttttgtataagatactcatttctttaaagtacagaagtaggaaagagatcttgaaacgtaagtgttccgagttcaagtgtttttaattgtattttaaaagttgagagcaagagcagtacgtgaatttgaaaatgggccgaaaaccagttgtaagtgcccaaagtaatacaggattattagggcaatgatgtattattgctagaattatcacttttgcagaatgtgttgttttttaagtggaaatagatccactcacattgctttttaaatttttgtgatattgctagtagtgttttggatgagaagagacccgagctaagagaatataattttcctgacaaatctctggctgcaataagtagttgtttgcttagtttaacgaggtgtgtttttgtagcttttaaaagctagtctttcctttagaaaatgagcgttttattataatttagaagacatgaaaaaggagaaaagaaaaaactcacgttattgatattctcatgtcatttcatttccccccccatgtattgtgtgatatgtgatcatcttgttttgtattgatcatttttccagctaatacgttgtgaacaggtttatccctctcagtctcagtcttttggacttcttcatggctgcatagaatcccattgtaggaatatactgttgcatatttaggtggtttgaaattttcattgcttttcagtaaatgcggttaacgattgctggctttaagatgaaatcattacttccttgtagattaacttttaaaaccataattacttttctgattttcaaatttgtcataattatgtataaatgcttaggaaaattgtaaaataaagtgctacagaaggaatatctaaaaataatattagacgaagcagtttattactagaggaatatgcagcttctcttcaacacataatgcgttatcagtctgcaaacaagtttttgattatttgccatttcagtgagctgttttttttctcatctgcttttatgtaaattagagtaatgaggctgacatttagatagttaaaacaagttatcgaacttctgttatagatggtgtgtaagaatatggcctctggtttgagtaccagcttcacctcttagtagctgtgtgaccttcagctaagtttcttcatttataaaagaataatagtggtgatctcagagttttgttaggattaaatgagttaatgtagaacagtatgacactagtagtcaataaatgataattattataactataattatacaattcattgtattagaaagccagatgttccttaataataattaggtaactactgaattttttttggtttttgaccattcagacttttatcaggtagtggagcataattgatgtgttttcatttagctaaaattgaagttaaaatcaaactgttgctgaaagtatttgatttttcaaaattttgcaaattcacacaaaaatagtaaaaattactgggcgaatgatatgttcttacctatttaaaaatttctctggccctgtgaatggaacatgtgttaagccatctatgcttttactgttggtataaatgccacttgttttatgtgagttttataaaccagagttcttgataattgtgtaaaaattacataaattattttcctttttaagttcagtggcatttcagtagcaatgtaagcctggacagaggttacaggttaccctttttattcagtgtgcctgtggctaacttttgtgttccttgatactattgatggtgattgtgatttatgcacagctgtggctttaatgtagccatggtttctaccataatgttaggccacatgtttttcttttgatttgtgaccgggctcttattaatttttctcccctgaaagaaatatgtgggtatcccaaaagcctaaagttagatttctgaaattattttgtttaacaaagagtgtacttagaaacctgttttcttaattttcatagttctgaaaactttaattgtataaaaatgaaatgtccaaaatataagtagatcatggtaagaagcattattagtggtgaatatctaaaataggaaaaaggtaaaacatctgacagtcagtacaacatatgattattgtaattaattggatttttttattaatggtatgataaaatattaatgaatttcgataacttttcatgtcaagtggaaggaatgaaggccagctgaatggtgaaacaaatacacccattgaaggaaaccaggcgggtgatgcagctgcctctgccaggagtctaccaaatgaagaaatagtgcagaagatagaggaagtactttctggggtcttagatacagaactacgatataagccaggtaagttggagataattaactgtctcaaaaattttcttttaagatttttttgaaatttgaaggttaatgttagtttttgacttcagtatttaagatatttattaaattaaaaactttaggctgggtgcgatggctcacgcctgtaatcccagcactttgggaggctgaggtgggtggatcacctgaggtcaggagttccagaccaacctggtcaacatggagaaacccccatctctactgaaaatacaaaaattagccgggtgtggtggtgggtgcctgtaatcccagctacttgggaagctgaggcaggagaatcgcatgaacccaggaggcgaatgttgcagtgcgctgagattgcgccattgcactccagcctgggcgacaagaatgaaactccatctcaaaaaaaaatttttttttcagtaaatttaagcttttgtttaattgatttaatgaagactttcttgtttaaattttccttccatacttccactggaaaacaaacattgatgtacttgtttactctgctggtagaatataatttttatttttgacttagtttcagtttatttgattcagtttctttttcttttcttttcttttttcttttttttgagacagtttcactctttttgcccagcctggagtgcaatggcgtgatctcggctcaccgcaacctccgcctcccaggttcaagtgattctcctgcctcagcctcccaagtagctgggattacaggcgcctgccaccatgcccggctaatttttttttgtatttttagtagaaacggggtttcaccgtgttggccagggtggtctggtctcgatctcttgacctcatgatccgcacaccttggcctcccaaagtgctgggattacaggcgtgagccaccgcgcccggcttgattaagtttcttagtatcaggaatttgagtatggatttttattaaacagttgtgtaaaaatacccatcccacttaaactgcagtggatggagaggaatcattgcttgaatatttagcgtttttggaattgattaattgatgtttagaaatgaaggatttagccacaaaaataacagtcattaccttgatttagttctggaatcaagtttgtaatatggttggtttgtcctcttttttggggggaactttagctgtgcttagattcatgactctcaaacagacttgcttagattcatggctctaacaaccttcattgaagtatgacttatctaacattttgtattatgaaacaaacaattaatagaaaatggtaagttttgctttggcctatgtcaagtgttgatttattttcttctgtagtctttttttttttttttttttttttttttgagacggagtctcgctctgacgcccaggctggagtgcagtggggtgatctcagctgactgcaagctccgcctcccgggttcacgccattgtcctgcctcagcctccggagtagctgggactacaggcgcacaccaccacgcccggctaattttttgtattttttttttttttagtagagacggggttttaccgtgttagccaggatggtcttgatctcctggcctcgtgatccacacgtcttggcctcccaaagtgctgggattacaggcgtgagccacagtgcccggccttttttctgtagtcttaatggctcagatttctgatgagcttttttgggggtccctaagatttatctaatttgatattggcattagagtaaataaatcccatctggttgttaaagttgaatactcccatctctttagggtatgtaaattcaaaccttcttaagttgtaaattaaggactaagaatttcctctctaaaatcagtattcttttctaaaatagaaacatttgaaaagttatttattagtggttttagaatagtattgggggaaaatgttatctctttagggtatgtaaattcaaactttcttaagttataaggactaagaatttcctctctaaaatcagtatccttttctaaaacagaaacatttaaaaagttattttagtggtttcagaatagtattgggggaaaatattatttttattagaatgtaacgtaggcatgataaggtaaaatttgagttctctatgaatattttatatttgttattcagatatttttatactctgtagaagcaatcactaacctttgttgaaagcttattctgtgccaggcattatttgatgtactttgcatgttttaactcactttatcctctaactctagaagacacaagtgtgtcagtaatttggccaagaccattaacctagtaagtgatgaactgattgaggattcaaaagtggcagtctgttccagagccagtgccatgttgcttcctgtataaacaagggttaataatcgcaaaaattatattatgtgggtatttttaatagaaactgtagcaactaataacatgaaatatattcagtgacaaaagtagtttaaaagtaattttgctatgatttgagagctggagggaataattattttaatagaatttagtgaaacatgtcttaatgtaattcaaagtaagttttggtgtttaataatttatttttaacccaggcattagttgtggaaagaattatcagaaaagtagtagtctccaggttaactgttttatgaaaaatagtttatttggtaacttttaatttaacgtgaggtgttatactgtggggtttttttttttttttgagacagagtcttgctctgttgcctaggctggagtacagtggtgcaatttcagctcactgaaacctcgacctactgggttcaagtgatccgcctcagcctcccaaatagctgggactacaggtgcgcgtcaccatgcctggctaatttttgtatttttagtagagatggggtttcaccatgctggccaggctggttttgaactcctgacctcatgatccacctgccttggcctctcagagtgctaagattacaggcgtgagccactgtacttggcctgtactaaggtgttttaacatggaatgtaaatatgggtttatatgatttaatctaactctactttggggaatgtctgacaaaattaatttctattacttttagacttgaaagagggctccagaaaaagtagatgcgtatctgtacaaacagatcctactgatgaaattcccactaaaaagtcaaagaagcataaaaagcacaaaaacaaaaagaagaaaaagaagaaagaaaaggaaaaaaaatataaaagacagccagaagaatctgagtcaaagacgaaatctcatgatgatgggaacatagatttagaatctgattcctttttaaagtttgattctgaaccttcagctgtggcgctggagcttcctacaagagcatttggcccatctgagaccaatgaatcccctgcagttgtgctagaacctcctgtagtatcaatggaggtatcagagccacacatcttagaaactctgaagccagctacaaaaactgcagaactgtcagttgtatctacatcagtaatctcagagcagtcagagcagtctgtggcagtaatgccagaaccatccatgacaaagattctggattcctttgcagcagcaccagtgcctactacaacactggtgttgaagtcatctgagccagttgtaacaatgtcagtggagtatcagatgaagtctgtgctgaaatctgtggagagcacatctccagagccatcaaagatcatgttggtagagcccccagtagcaaaagtgttagagccttcagaaacccttgtggtatcatcagagacacctactgaggtgtaccctgagccaagcacatcaacaacaatggattttccagagtcatctgcaattgaagcgctaagattgccagagcagcctgtagacgtaccatcggagattgcagattcatccatgacaagaccgcaggagttgccggagctgcctaagaccacagcgttggagctgcaggagtcgtcggtggcctcagcgatggagttgccggggccacctgcgacctccatgccggagttgcaggggccccctgtgactccagtgctggagttacctgggccctctgctaccccggtgccagagttgccagggcccctttctaccccagtgcctgagttgccagggccccctgcgacagcagtgcctgagttgccagggccctctgtgacaccagtgccacagttgtcgcaggaattgccagggcttccagcaccatccatggggttggagccaccacaggaggtaccagagccacctgtgatggcacaggagttgccagggctgcctttggtgacagcagcagtagagttgccagagcagcctgcggtaacagtagcaatggagttgaccgaacaacctgtgacgacgacagagttggagcagcctgtggggatgacaacggtggaacatcctgggcatcctgaggtgacaacggcaacagggttgctggggcagcctgaggcaacgatggtgctggagttgccaggacagccagtggcaacgacagcgctggagttgccggggcagccttcggtgactggggtgccagagttgccagggctgccttcggcaactagggcactggagttgtcggggcagcctgtggcaactggggcactagagttgcctgggccgctcatggcagctggggcactggagttctcggggcagtctggggcagctggagcactggagcttttggggcagcctctggcaacaggggtgctggagttgccagggcagcctggggcgccagagttgcctgggcagcctgtggcaactgtggcgctggagatctctgttcagtctgtggtgacaacatcggagctgtcaacgatgaccgtgtcgcagtccctggaggtgccctcgacgacagcgctggaatcctataatacggtagcacaggagctgcctactacattagtgggggagacttctgtaacagtaggagtggatcccttgatggccccagaatcccatatattagcttctaacaccatggagacccatatattagcatccaacaccatggactcccaaatgctagcgtccaacaccatggactcccagatgctagcatccaacaccatggactcccagatgttagcgtctagcaccatggactcccagatgttagcaactagctccatggactcccagatgttagcaactagctccatggactcccagatgttagcaactagcactatggactcccagatgttagcaaccagttccatggactcccagatgttagcaaccagctccatggactcccagatgttagcaaccagctccatggactcccagatgttagcaaccagctccatggactcccagatgttagcaaccagcaccatggattctcagatgttagcaaccagcaccatggactcccagatgttagcaactagctcaatggattcccagatgttagcatctggcactatggactctcaaatgttagcttctggcaccatggatgctcagatgttagcgtctggtaccatggatgcccagatgttagcgtctagtacccaagattctgctatgttgggttcaaaatctcctgatccctataggttagctcaggatccttacaggttagctcaggatccctataggttgggccatgacccctatagattaggtcatgatgcttacaggttaggacaagacccttatagattaggccatgatccctacagactaactcctgatccctataggatgtcacctagaccctacaggatagcacccaggtcctatagaatagcacccaggccatataggttagcacctagacccctgatgttagcatctagacgttctatgatgatgtcctatgctgcagaacgttccatgatgtcatcttacgaacgctctatgatgtcttatgagcggtctatgatgtcccctatggctgaacgctctatgatgtcagcctacgagcgctctatgatgtcagcctacgagcgctctatgatgtcccctatggctgagcgctctatgatgtcagcttatgaacgctccatgatgtcagcttatgaacgctccatgatgtccccaatggctgatcgatctatgatgtccatgggtgctgaccggtctatgatgtcgtcatactctgctgctgaccggtctatgatgtcatcgtactctgcagctgaccgatctatgatgtcatcttatactgctgatcgttcaatgatgtctatggctgctgattcttacaccgattcttacactgacacatatacagaggcatatatggtgccacctttgcctcctgaagagcccccaacaatgccaccgttgccacctgaggagccaccaatgacaccaccattgcctcctgaggaaccaccagagggtccagcattgcccactgagcagtcagcattaacagctgaaaatacttggcctacagaggtgccatcatcaccatctgaagagtctgtatcgcagcctgagcctcctgtgagtcaaagtgagatttcggagccttcagcagtgcctactgattattcagtgtcagcatcagatccctcagttttagtatcagaggctgctgtgactgttccagaaccaccaccagagccagaatcttcaattacgttaacacctgtagagtctgcagtagtagcagaagaacatgaagttgttccagagagaccagtgacttgtatggtatctgaaactcccgccatgtcagctgaaccaactgtgttagcatcagagcctcctgttatgtcagagacagcagaaacatttgattccatgagagcctcaggacatgttgcctcagaagtatctacatccttgttggttccagcagtaactactccagtgctggcagagagcattctggagccgccagccatggctgccccagagtcttcagctatggctgtcctggagtcttcggctgtgaccgtcctggagtcttcgactgtgactgtcctggagtcttcgactgtaactgtcctggagccttcggttgtgactgtcccggagcctcctgttgtggctgagccagactatgttaccattcctgtgccagttgtttctgcgctggagccttctgtgcctgttctggaaccagcggtgtcagtccttcaaccttctatgattgtttcagaaccatctgtttctgtccaggaatcgactgtgacagtttcagagcctgctgtcacagtctcagagcagactcaagtaataccaactgaggtggctatagagtccacaccaatgatactggaatctagtatcatgtcatcacatgttatgaaaggaattaatctatcctctggtgatcaaaatcttgctccagagattggcatgcaggagattgcattgcattcaggtgaagaaccacatgctgaggaacacctgaaaggtgacttttacgaaagtgaacatggtataaatatagaccttaatataaataatcatttaattgctaaagagatggaacataatacagtgtgtgctgctggtactagtcctgttggggaaattggtgaagagaaaattttgcccaccagtgagactaaacagcgcacagtattggatacctaccctggtgttagtgaagctgatgcaggagaaactctatcttctactggtccttttgctctggaacctgatgcaacaggaactagtaagggtattgaatttaccacagcatctactctcagtttagttaataaatatgatgttgatttatctttaactactcaagatactgaacatgacatggtaatttccaccagtcctagtggtggtagtgaagctgacattgaagggcctttgcctgctaaagatattcatcttgatttaccatctaataataaccttgttagtaaggatacagaagaaccattacctgtaaaagagagtgaccagacattagcagctctgctcagccctaaagaaagtagtggaggagaaaaagaagtacctccccctcctaaagagacactgcctgattcaggattttctgccaatattgaggatattaatgaagcagatttagtgagaccgttacttcctaaggacatggaacgtcttacaagccttagagctggcattgaaggacctttacttgcaagtgatgttggacgtgacagatctgctgccagcccggttgtaagtagtatgccagaaagagcttcagagtcttcttcagaggaaaaagatgattatgaaatttttgtaaaagttaaggacactcacgaaaaaagcaagaaaaataagaaccgtgataagggggagaaagagaagaaaagagactcttcattaagatctcgaagtaagcgttccaaatcttctgaacacaaatcacgcaagcgtaccagtgaatctcgttctagggcaagaaagagatcatctaagtccaagtctcatcgctctcagacacgttcacggtcacgttcaagacgcaggaggagaagcagcagatcaagatcaaagtctagaggaagaagatctgtatcaaaagagaagcgcaaaagatctccaaagcacagatccaagtctagggaaagaaaaagaaaaagatcaagctccagggataaccgaaagacagttagagctcgaagtcgaaccccaagtcgtcggagtcggagtcatactccaagtcgtcgacgaaggtctagatctgtgggtagaagaaggagctttagcatttccccaagccgccgcagccgcacccccagccgccgcagccgcacccccagccgccgcagccgcacccccagccgccgcagccgcacccccagccgccggagccgcacccctagccgtcggagccgcaccccaagccgccggagaagatcaaggtctgtggtaagaagacgaagcttcagtatctcaccagtcagattaaggcgatcaagaacacccttaagaagaaggtttagcagatctcccatccgtcgtaaaagatccaggtcttctgaacgaggcagatcacccaaacgtctgacagatttgggtgagtcattttaaagtttaatgggatggtagtagaaaatgttttaaaccttaatttttttctgaccttgagtcaagtgaaatacttagttactggtttaggataaatgtttctgtctttaagtttttattattacatggtactgtatttaggaactactgggatcagtgtattataattagagttaaaaagtcctgtttcagagtataatagaaccaaggtgtttccatatttgaatgttttattttgttttagttatcttgccatagctaaaaattgaaagcagaaacagatgtagaactctagctaaattaaaaacaagctaagtatatgctcagattgttattgtatgtgttctaacatacatccttgcaactaagcctaaaattacaatgttcctttttaaataagttaacatatcttaaaatggcattataggactgttaaatgaaggtaattctgattggtatagttggtaatggaagtgagtggggaattttgcgtgtgggggttatttaattgggtaggtgatactagctaaataaagttaaatattttagatcagtgtgatttttaataacctgttctgctttactttaaagataactgttctaatttcccctgatttttagtgtgcagaggtgattaaaacttgatcgatatgaatgattacctataataaatatggataatttatccttatcccagtatactggacatttctaggccaggattgtctaaagaagaagaggttaagagtaaaaagggagaatctgcattcagttcaacagaagttttctgagttcttttttattcacagcagaggaacagtatgtaattcctcaagtgattgcaagtggtggaggagacatgggtaaaatgcatatatgtctctcttatagtaacactgtctaaaaaggacagaatgtgattactataatactgatagaggtgaggtactttaggaacacaatgggaaaaggggaaaaggaatgttaattctgacttaatgacagcttgttagaagaggtggcacttcggctgggcatggtggctcatacctgtaatcccagcactttgggaggccgaggcaggtggatcacctgaggtcaggagttcgagaccagcctggccaatgtggagaaaccccatctctactaaaaatacaaaaaattagatgggtgtggtggcacgcgcctgtagtcccagctactcgggaggctgagacaggagaatcacttgaacctgggaggtggaagttgcagtgagccaagatggcgccactgcactgcagcctgggcgacagagtgagactgtctcaaaaaaaaaaaaaaaaagaggtggcacttgaactggggctcaaagagtgatttaaggtgtcagaaggagagtaaggtcatgataattttgtgaaatgaaataggctttggcaggtttatatcttagagtgtgtgtagtagggtgatcattatagttgtgtagtaacctattgtaatattctaatgggaagctcaatatgtggacttaattccctgaatgaggccactgctgaaaaactttgagccagtggtttgatcatagctgtaacttagagcagaatattgatgcctatagttttttcctttttttttttcttttttgttagatacccaagttcttcgatggatctaggatgcctttagttttgttagtatgttagacttttggtaatacaaaatgtacagtcttttaggaaaactgcagcttgtatttttcttcttacagataaggctcaattacttgaaatagccaaagctaatgcagctgccatgtgtgctaaggctggtgtccctttaccaccaaacctaaagcctgcacctccacctactatagaagagaaagttgctaaaaagtcaggaggagctactatagaagaactaactgaggtaagctagacagaatttgttttcattcttaaatggattattccagtgatgttgactctggagcgtgccaaaacccgaattgtgggcagaactgataatggctggcaccgagtggccaaaacccgaaatacagatgtggcagcggcagaagctctgtttagcaggccattatccgggatggctaagctccgctagctaaaagttacttcccattacttttgctttccagttttagaagccaaactgactgaggagtgggacggttcgtttgaatggaggaggtgttgagtgagcaacacgcagaagctcgcctacagtttcgtttccattcacgacgcgttcactgatcgccacgagtatactgcatatacgcaaagacacagacaatcttcagaaatgatcttttgccaccggagcttggaaattaataagaatagctggccattgcctgaaaggaacttctttcgcatcaacatttcgggttttggctgtttggtaccagccattggcgataatggccggccattatcagttcttcctgcggttcgggttttggcagtaacatatatattttaaacacacttatttttgtttttaaaagtttgatcttttcaattgaggcttttttggggctttgttttattactatttttttggtgtgggtggatggggggagatgctaaaatattgctgctaggatccagaaataccacactgtttcatatattggaacttgttattggctagccttatgccagcctgccactgtcaatatattctgttccccttggttacaagcttaatatactcttgtgtttttggcgaaatgagctttttatcctattgtaatattttcaattgataatagatgtcattaaatctactgcttgtatagagacaggtgtacccaaatttactcttgacctttttataaagccaggtaatggagtctgttcctttgcatctcaggaaggaattgactttgctttatgtatcagacctcatcaattgcaccctctccatcatgccttattttcctaagttctccttaaagaaactcaacccacaaaacatttatggagagacatgttgctatctaatcctgttgcaaatatttcagatcttttgttttgccatacatctgggaaaatgtaaagcttctgaatctgtttcctcacttagatttattacaatatgaattacaactttttttaaaaaattaaggaccttgtaaacgcttctattgcttatttacctaatccaagctccttatccaaaatgctaaggacagttagtattttgctgttttcggccccatcttcagccttcttgtcccaagtttcttctcacctttttaccaccacctgactaggatgacttctcctttccctaccagtctttgttctttactatgaaaatctggcttagaactcttcaaggaatattccttgattctctaactctgcctgactattctctcttaagcctttgttcttttagcacttatgtactcagtttgtattatatcagtttgcacttgttattgtgttgctctgtaaaagtgttcaattatttcatgtatatgtattccttctcttgtactagattgtaagctccttgagagcagggaccatgtcttctactttttttttttttttttttttttgtattccccagacagtgcccagtacagtgctctctctgcacatagtaggtgctcaataaatgttgttgactgactgaccagccagagtgtgtttaaatagtagttaatatgccaagttacgtatctataacctatcatgaatcttgtttaactttggaaagttgctattatgtggttttgattctaagaaattacatgttctacataaagcgtaagatttatcttttgtttgtttttacttttaaagaaatgtaaacagatcgcacagagtaaagaagatgatgatgtaatagtgaataaacctcatgtttcggatgaagaggaagaagaacctcctttttatcatcatccctttaaactcagtgaacccaaacctatttttttcaatctgaatgtgagtattagtgcttatggattggtaaaacagtgtaacttgtggaactatttaaataaaacccaaatcgaatttagtttattaatttttgttttaaatactgtgagaaataatggataatatcatttccttcagattatgtagaaaatctcaaaccatttaatgtagatatcatattgagctttaattaagaaacactttattttttagattgctgcagcaaaaccaactccaccaaaaagccaggtaacattaacaaaagaattccctgtatcatctggatctcaacatcggaaaaaagaagcggatagtgtttatggagaatgggttcctgtggagaaaaatggtgaagaaaacaaagatgatgataatgttttcagcagcaatttgccctcagaggtaagtaggaggaatattatgtatttttccttttttatacctgaatctgccatttcattgttatgttatgtctgatttggattctgtttcactcttcttagggccgggttaaacggcagggccgggttagacgacagatgaaacaacccgcagcttctcatttgacagtaactcgatgcaattcactttgtggaaccaagccacaaagtgaaaagcatcgaattgcagagaacagtgttatcacatccctacccaacattgggccctccctgcacttgtgggaaggtagtccaaggtacaactatttagcttcccgatttgcttcaaggctctatagctctagattttggtggtagcaaatttatcgggtggagggattgatcggagagggcagatcctcaggttcaacacaagaactggattggaaaaggtcattgtaggttgatgtgagcatcttgggtacatagcccattgcccttaatgatggtttcttactgtttctctgggttgtttgtcagatagcctttaattttaattatttttccttccctttgctaccttggcccttttaaattcttgtgtttaacctaatgctcagccttggtactccattcccttctccttcccctctttgctactattaaaagtcggagaagtggaattcaaacgttgaaatttccacggggctatagttgtatcttaataatgccaagtgtcaaaacaaccccattaaaatgccgcctgattaaataatgtgctgctaaatatagtgcacatgaaaacagcaagactgtatatatatgtaaatatatatatatatctgtatctttgtatgtatctctgtatctgtacctttgctgtatcttttaataaacagtttacttttatttaacttgttgtgcaaaatcacgcttgggggatgtgggagggtggagtcttaataggggggtgggagttttaattactatagattagttgtcatcgcctcttgcccttggtttccaaagcccagacttttgccaaggactggactaggtatctgatgcccatctggacatttttcttgcagttcttggatatgtagatcagagacacctgtactcttcactgtaggttcccttccttggcttggccatatcatcatcttccagtaaacacctccaattctacaaataaatcctgtttataaaatcagaaagtgaacagaacccaaatcagaaactttttgatagcagtacttttctccccaagctattcacagctgacattttcactttttttttgtttgtttgacctgcagcattttgagagaacaagttctgtacaatgaagctggacatgataactagccagtgcaacttacagttactggtgataatctgtattcccatgggattcaacaagtgaagcaagttatgccatcaccagttaagagggagatagttggtttggataatattttagtgagaccatttgagttgttaatcccccaatcaggctacctgcatatctcaagagagaaaggttaactgacatgtgcagctgacttaatcttcttgtagtagctgaatagaaaccatgataagagggttgaacaggcttacttagaaatcctaatatgtatgcttttagtaatttcctgcagtttaagcatttaaaaaagagttggaaaaaaaaataggtagggagagagtctgtatgacaaatattttccactgaagacttaacaaatattgcagaattccaagggatcttcctgagaagataagtgagcataactgttttgaatttcttcggttcaatcatggggaaagtgcttagtaactcctgatgcttacacttttttgagagagagagagtgtgtgtgtgcgtctatttatttgaaatttagtactcagccattttcaatcttaacactgagtgtggtgccttagccttgtttgtcatcaaaagttgtcagattttaattaaaggttgaggagaattattcttaaatctggtgggaaaagttgatagagaaaggtactcaaataatggtgacattattttttgttaaaaaaattttttttcttaccaaagaagaatcctagaaggtaaaattattttacaattcttttcaaagggctaaatgaataaagcagatgatgtctcttgtgggacgatatatgtaactatttgatataaaacctctttaagctgcttagaagattagactcaaaagaacatacagattaattctaaagaagagaatcccaaaatacaagggcaaagaggcaggattgccttttgctttcatatctgcacttttacctggcaataatgttaaaatgtgtagaggaaatagtcacaatttaaaatgtttagttccagttatttagtgaccatctaaatatactatattgtatatatagaaggtaaaagtaatgaatttattatttatacaattagtgttatatataccaatgttgtgaaatacttttggtaacacttcgtgggagcattaacccttttgattccttgttagagtttgaaataaaggcttctagagtaaaaggagatagttcttttaaatggtcaacctttgaactgaatagtaatttttatctatgcctttttcattttaataaatataaatggagtttgtggttctttgttgttgagcataaaacatttaggcaaagatcacagattttatctccataagagggctgaattagctttgctgtaatccctaatcccaccaattgtcttgcatatgaatgctctttgacatgagtatgaatggatagacattgtggatgaagcagcataaattcatttcttatggaaaaacaactcatcagactgtgtgcggtactgccatagcatcgtcttcatactcagaaaccagccagcatcatcctcagtaaggagtgactacagaactttgactgtatttgtgtgaatttgatttataaacaatgaaataaaatgttggaaaactaatattttaaaaatagtcctcaggggcattaattcttggtaataaagttagtagaggtttattgagtagaagattaggatgtaatctttgacataagtggagtagtaactactcaactattagtgtggagttttcatggatttagtatcaatcaaatgttttaggggtccagaggtagtattgttaaggtctagtgaatgcttagatgttaagatcatctttatgttaagcagtttactggtttgtatttatcaaatcatatttccacatcccaatggaattacaatttttttaaatttataagctctaaatgtataggaaaacttggagaaaaatgaaaattttaattggaaattaaacacataggtcccggcactgctagaatgtgtaatatacagccttgttattctttccttcctagattctcttatgtggttaacgctgaatttctctgaaccatttagtaggttatctatttgttttcccgttgtacttcatttagtctattatacactagagaattttgtatgatacaataaaaagattcgtaattcactttttaaagccaaccaaacacataactgggacattctgtggcttttatttttgtagttgtcattttgctcttgtatgcattaacctctttatattttaatatttgctaaatattctaaaatcatgttttatatacaggccagatgcttttaccttaggtctattttcttataattaaagttttccttttatgcctgcttttgagatatctgtgattaccaataatagaaaataattttctggttataggtattttccttatctgactcaccccatcctaacaattatctttagctcttttatatcctttcactgatattctaagaagtctcttaaaatattgttctttttatgtcaacagttgtgttaacaaaaggagtaaatggatttagaagaatttcctaaatgagaaataaaaatgtaaaaggctcacttaaatgtattaatataggtcatgaaatgcatgttatatggtgccagttgcattatggtaatttcattatgcctcagacacctttgtaggttttataagaagtagttgtctgctttcttgctgagggagagagagtgaagaatttgggcagtttttatttacctgagatttgtaattcaggacactttttatgtaaatttcaccttttagagcaaaggtgaaaagtcagtaaacatttcccccattatcatacctagaatattactacagaattatttttatacactaggtaacatgctagtcttatagtgtattggtagaaactaaggcttgttggtgacagcttggtaatagtattctacagattaaagattctctttttcccagtttttggaggggccttttaccatcattttggtgcctttcttatatttccagtttctgaatattaaacgacagttaagattctaaagctctattgtccaatacagcagttaccagcccctgaaaaatcaggtttttaatcacactagttacatttcaagtgctcagtagtgatcactgtaagaagttgtactgggcaatgctgctctaaagggtagctgtggtattatgagtgtttcaatactgataagtaacatcgggtttgacccttaaacattgctgctttggggattgtattggctttttatgcctcattgtataacttgagttaccttgaaaggctggaaacaggctttttgatgtaaacttttgaggatctttatgaggttaagataatcttgattcattctactttgagtatatgttttcgcattaaaaataaaaatatggccaggcacagtggctcacgcctgtaatcccagaaatttgggaggccaaggcgggcggatcacctgaggtcaggagttcaagaccagcctgaccaacatggagaaaccgcgtctctcctaaaaatacaaaattagccgggggtggcagcgcatgcctgtaatcccagctactcaggaggctgaggcaggagaatcacttgaacccaggaggcgagaggttgcagtgagccaagactgtgccattgcactccagcttgggcaataagggcgaaactccatctcaaaaaaaaaaaaaaaaaaaatgaaaccagtagtcaaattactatttggtaatacatttttgacatgaacttgcagctcccttggtaagtctgttgaagagtaaatgaagttttactacctcaggaaaaacatagttgtaattttatttaaatatcaaggttgctataataaaattcctttcagaatcatgagtttaatatgaaacactaagatttgaagagtttcattctggggataaatggtgaggcatttaggttaaacgtttaataaaggctaagagagaagaacattcgcaggtgtaatagtttgctttccacttggaaagaattagttttattctagaagttatattttagagccatctgaatagatgagtagctaatttatagttggaaattagggatcaggagttgggatagtgggtagacacattttccccagtatcctcagattttagccttgttagaataaaagcctattatttatgcctaagcaccctaacacttagatttatagagactgctaggaaaagcaaagtaagtgtgagaaggttaatgagacagtacttgtcgcatcttgtgtgccttcaaaaattaccttgataatcctacctgacaaaacatcttaaggtaggcctagggggacatgaattttcacctgaaatatctgcattctcattaaagtcccaggaatcaaacagacttaagtgaaagatgacatactaagtttcttagtgtttcaatctcactttgcttagattaatatttctaataggtcttagaattgttctaatttgtgtgatgatttacttaaatcaacttagcgaaattacagttgagagattcaatttgaaagatgcattctgcagttgattagactgtttatagatctctagaaagatttatatattaacataaacagtcttaattacagaaaggattaattttgttttcattttaagaaggcattgtatcagaatccatacttaaagaaaaaccttgagttagctaaaggaatattagtttattagcaaggtaactaagaattatggaggattaggggttctgaaggtaagaaagatttgtgaatccttatgcatgagttataattattctcatagtcatacagccttctctactagacaggtcttattcttaagagaagtcttttatacatgatacatagtcttaattacagctagcctctacttgtaaaaaagaaaatccttagccgttagctatttactgacttccccgtatttgttatgttcatgcagtgtctacttattctttgtatatgaaaacagcaaaatcttccatgtcagataagcattttacaaaaatgaattttcttgtgtgagataactaggaaataataataatgttaaaagaaggacaaaaaccaagaaatgagttgataaaaatcaactcgagcttttaattttagaacaaaaaaaataacaaatacttatcttgatgtgtttttcattctgtggttaaaccttccacaaatctgacaaattaagaattggctccaaagattactttgaaaaaaaaagtttcttccacttgccgtaaggttttaaaaggtagaatatgagctttgaaaagaaacaaaagtgtttcagttgatgttatggacttccacagaaatattgtaattataaatagtgtaatatacttaatataagtaataagtgtgtataaactgaaaacatggttcatttatttatatcctgaatatattgtttaaagaaattgggttcttaagaccaaagtgtccacaactggaagatgttaaagatacgctgatgagtaaaggagtgatcatagtggttttctgcttgcttgttcagtaattttgcttactgctcttgaaggttatgctaatgagtaaaatgaaaactgctaaggaatgtaataaccttaccacagttcaaaaaatttgcagtttactataaatggctttcaatcatgaagagtagcgagttttaagttcttaatggaactttctatgattatagtttgatatatatatataatagaaaattgactaaattcagtcagattttgggttcagttctgcgacctgtgtgatactttgtaatttatcttaatcctcttctgttttccaagattactttctctttctgagtcttctccctgttttccaagattattagtattataagactattattttgtttttgatatgtagcaactaaagatatgagtacttttcagaatttaggggactatggtaatttgagataattatctctgttttctttcttagcctgtggacatctctacagcaatgagtgaacgggcacttgctcagaaaagactcagtgagaatgcatttgatcttgaagccatgagcatgttaaatagagctcaggaaagggtatgtagcagttttttaaaaaaaattattatttaccatcagccaactcacaccaatgtaccagttttaatgtctaaataagaattttgctaactagatggttgagttgtaacatcctttaccttattttcaatgtcttattttaaatgaaagtgattcgaggcctgatcatttattcaataaatgtttattgtttactatgtggcaggaactgtttcttgagagaacaaaatagaaaaatttccctgtcctcacagagtttacaatctggtgtataaaaacaactaagtgcctacaaccctatgaaatgtgtaggtattaatagttgccatatttcagccgagaaaactgaagtaaagggtggttaaggccaggcatggtcgctgatgcctgtaatcccagcactttgggaggccgaggtgggggcaaggagtcaggagttcaagaccagcctggccaaggtgatgaaaccccatctctactaaaaatacaaaaattagctgggtttggtgttgcatgcctgtaatgccagctactcaggaggctgaggcaggagaaatgcttgaacctgggaggcagaggttgcagtgagccaggatcgcgccactgtactccagcctgggcaacagagtgagactgtctaaaaaaaacaaaagagtgattaagtgatatccatagtcacacaactaattagtgggggaactgggattcaaacccaagcaatctgaatctggagtctgtgcttttaacaatggacagcctctccatttcatttctactgttttatggtaaatcagtaagtacatgttcagacaggaaatacattgctgacagtgcaaggtgtttagtaaatctaatttgtgtgaatgacagctgatctttatcacaacaaatgttggtgactgaaaaaaagtatacaagcttctttaaaaagttgttttacggccgggtgcagtggctcacgcctgttatcccagcactttgaaaggccgaggcgggcggatcagttgaggtcaggagttcaagaccagcctgactaacatggagaaaccctgtctcgactaaaaatacaaaattagccgggcgcggtggcgcatgtttgtaatcaatcccagctactctggaggctgaggcaggagaatcgcttgaactcgggaggaggaggttgcagtgagcagacatcgcaccattgcactccagcctgggcaacaagagagaaactccatctcaaaaaaaaatagtcgtttatgtattcaagtggacagtttcctacatttaaactctttaaacctgtgtcatgaatttagtctgtataaatgtctcaaaggaagtaattaagaatccaggctgtcatgacatgtattacaatacatttgtatgagataggaagggagggtggggacccattgtcatatgagctcttttttgcatttttagtgtatctgtgtgatagtttgaagaatattaacagctgtattttttagtagctgtgcttttagatacatttcaaaatcttattaatgggattcactaaatgttgtcaaactgcttctttagaaagtttaggcaaacatttaatgttaaatatgttttaaaagttaaatatttaagtctgcttttcagccatttttagtgaattattaccagtgatgttttaatcaggtaattttacttagttaactgagactacttcttttcttcagattgatgcctgggctcagctgaactctattcctggccagttcacaggaagtacaggagtacaggttttgacacaagaacagttggccaatactggtgcccaagcctggattaaaaaggtacacagtatatgcacatatgaaagtgtcgaacaaaaagtttaaattttttggaaactgtttattaaaactgcatgaaaagaccagtgactctaaccaaagttccaagtaaatttgctatgtgtatatgctccagggcggacactgaagacggactggattcatgagaaaatggcaaatgtataaatgtggctcaagagccactaacttataaggttattttaaaaattgttactgctgcttttgaaggggtgatttaactttattttgaacgctaatagtgtatcaggtgctgttcagaatattccacagttcctgctggactactaacctaatcatttcaaagcagtggttctcaaatttttcttcatcatgggatactttattacaggtttatttttagtggatcactgcccccaagagccctctaccaccttaattttccattcctctattcctttgccctcgcaccccacccgcttcattagtgcctgtgccttcttgtaagatctcttggcccccgttcctcactcctcttgtgacctgtagccccaggaccttttggttgtcagctgctggttacagcaagtggttgggaggccctagtattagctctgcatgtggtgatcttgccatgggactggaagcctgagggaggatggctggagtggggtgggctgtggtgaaggggatgggatggagattaatctgtggaccaccatttaggccctagtggcctctggtgatccacaggctcaatttgagaaccactaatttcatgacaaaacagatatgtaagacctaaaatcaagggagagaatggacgcctcgtgctacgaagatgtaggtgcatctggtttcagattctgcagtgagacctgtgaactccacctacggctgcctcatcattgggggagtcttaggtggctaagaagggcattctgaagaaacgcgttgtggtgaagggacaaagcttggttggatgggtgatgggaaatttgttacaggagtactggcagcatagcagtgctgaaactgggaggccgcgtggtctaatggattgggaaggtttctttatcctgttgtactcctgactccttgtgtaatcatgggcaagtaactctttggaatttcaaagtctctgaggtgtctagtggtaatcagtaacgtgatggttacctatagagagttgctatgagtgccagtgaatgagctgaatttctgaaaaatgagacattggttgctttgtgtattttaatcttgtaacatttatttcaattttgatagctttatctttgttgatcttactaacaaattaatatgaaacatcatgtatactcattatgcctgcctttttttgggaagtagttgcactgatgtgtatagtgagtacacagttagattcattaagaaattacaatttctgcagtttgctgagggttggtgttagaataaagggtgaaaatgtatatagcaaaatattttaaagattggattaatcttggacttctatattatagttactatgaaagtgatttatataatatttgaaaaaatgtctttcatctttggaagaactataaatgtacatctatttctttagttttaattctttaatactatttagtcttgaagctaagtactcagccagtatttcaggaagttagaaataaagcttatgggtgttaaaataggcacataatacagagtcatgtacactgctaggtagaaacttctgaatgtgcttccattacaaaattttggtctttatctaatgatgtgctgatccataatgtttgtatacttataaatgtgttaataacttaaataacttttaaaaagtgaatcttttactgactcaattggttttcccctaaaataatttcttctggtatttgcagtcttgtaggcagttaacagactttaataactttaaaatgtttagtagcaccttgaaaaaaggcttcaactttatattttatgtaagatatactttgggaagcaaattattttgataaattatgagataaagatatgttcagaccaaattttaaattatagataaaagtagcacttaaaggaaaagattcatttgtatagaattactgaagaatatttgatgctagtatcaactaaaaaagaaacttttgaaaattaaaaatgggccacaacatgtagaagtcattaggcagctgaaaatttaggatgtatgatccatgttaaatatcacaaatattgtctactcattaaatgtttagttgtgtttagaaaacctgtcaaacgatcattttggctcttctttagtatagtccagcatctgccttatgtgttaaaaaacacatggaataccaacatcctccgtgttctttttagtttgttgcagtgtatttttagattacaaaaaaagcaaagttttatcagtagtctcattaatcagtaaaacatttaaagtagttcgtttaaaagaaattttatttctagaatggaatgatttggatgtgacctgataaatacagtttgttattgtggtctcattaaattaatcagctttttcacactggggtaaagaaacagatgatgatactagggaatggaaacaaaattggaaacctgggttatttggggatttatattgtactctgcacagttgcccttttttttaggcgtgttccctggaaaagagggacggatgaacctggaagtaagtaaaagacattctaggtgtgtagcatcaaggcagttaatatccaagcatcagctttctctttatacatctacactgcatggcctgcaccaaataaggaactgaaccaggggtatgtttttacctccacagctgcctccttccatcagagcaccttgatgaacttaatgtctagtcacacgtcattggcatgttttctccccagcatttaattacaaagctgggaaacaaaagatgatagatacagttttactactgcatacaaacatttcttttttacattcagtattaacttatcaatataggagatgtgcatactatttcctgagctactgaagtttttttactctctctgttgataagttaatgacttttgctatattatatatttatatatatatatatatatatatttggtaagagaacataaaaacctaaaatttagtaacaaggggaaaataaagcatgatttggagatatgtttcaaatttttaaaaaatgaccataaagatcaacagtacaacttaatactgtttgctatatgtacatggatgccctttaataagaggcattgaatatttcttaacctgtaaaaataactgttgaccatgctaatgtatatatacttgtgcatcttaggacattaagtggtttgctgctttgatggaaattatggttcagtgggttggatacaagagagatgactgttcacagaataacctgtgaactttcacccctctgtatggaaacttgtttcagggccaaatccttgtagctgtcttcttgccccggtcagtgccagccgtactattcacaacactgctgctaccgaggcctaggtatgtaaacatttaaggagttttttaaaagtcttttaacatcaagctaggttttaaaagaattcaaattcattttggcatacttacaggatattttatgtgattgttttctatttgttactgtgtaaatttcaagagtttttttttttttttctgctttagggattttctaagtaaaatatttatacttgctttatagtagaatggggaagaaaactttggatgacaacagtatgcttcttcagtgtctaaactatttctaagtgatttctgggctttattcataaactaggtacacctgggacaattaatatcattgattgttttaacattgccttctttttattttgcaagctaagaagagataccagtgaacctaaatagtggacgaaaacaggagtgttctaattttttttttttgaggggggcacgagggctactgtttcaaaactgccatttacttgtcttatttgacttccaaaatactattacgttaatgtgcaaataatcagaacatacacactacagtatgtataaagtatagaggaatttacatttaattgctataacagatctagaagtaaagtaagattcctctttttagaaagtaaacaatgaatctgtcaccaagttctaactgtaaaatggggacattttacctttctttctttggataggatcagttcttaagagcagccccggtaactggaggaatgggagccgttttgatgagaaaaatgggctggagagaaggagaaggattaggaaaaaacaaagaaggcaataaggaacccatcctagttgattttaagacagaccgaaaaggtaacaagttcttttttggaatgtttattaacgtctcctttaacattacctttaatatatccttttgaacccagtgatactgaactgaaggcacttcttgtatatatacaggtatttgtcagaaaaaacattaaccccttttggggttcacagagcagcttatttttatataactatggatagagacaccagtttgaacttttaaaaggcaccttttgttatgctagttgctaaatatggaaatgtgtatatatctaattttattattacacctccaaattcaactggatttcatgtttagaaaacaggatttccattttattttctcttgacaaggaaccatccttttttctagagtttagtttattttttgttagatattttagcacatcttcattatttcctattacaatactggtttagtctagatttcataaaccctgtttgcttttttcttccaagctcagtagttaagttgggttagagtatagtagaccagctgctgacaataatgttacttcttcctgttgccttgtgttaaggcatcttggaactgttagcattgactgtattttccttttaccttcagatacctgggcagggcagcactgtgtcttctatgtagcttgtatgtagttgctaagtatttaatcattcccacagatgatagctaattggcgtcttttaaataacttcttcccttggaataatgtaagtggaatcatgagaggcttgccagctcagtatgatttttgtatagcttgtttaaacctcatttataaaagctgacaaatgtaaaactgggatttattttcatctttgtaatcaaacagtaagttgaagctaacttcaatagttaaactgtcttaatgaatttggaaatgaactagctctgcaccaaatactttgatgttaagtattgtacaatttcaggaagcattgtccttggaattgtgggacatggcctgactgtaagctctcagagaaccacagatttcccaggataggtttagaaaagcttatattagcatggaattatttagcaaaggttgaaaaatttcctgtaacatacaggatgagcatcccacatctggaaacctgaaatgctttaaaacagaaaactttttgaatactgatatgatgctcaaaggaaatactcattggtgcattttggatttcagcctcttcagatttgggatgcttgaccgctaaatacaatgcaaatatttgaaaacctggaatcaaccgacacacttctggtcccaagcattttggataaggaatactcaacctgtatatgaattgggaaagcagtgtttgggtttagcaatgtagctaatcccctttgtaataagtctatggagagagaggttatgtagaaaggttatgttcatattttgagaacatctcccatttgttaggaagggagaggagagtttgctaggaaaaaagggacctattttatttggagacaaccgttttcacctttttggtggcttaaaatcctaaccttttttggaagagtcttaactgaagcttatttttttaagagacagtaaatctgcagaaatcacttggcaataagctattttttttctttttttgagatggagttttgctcgttgcccaggctgtcagtggcacgatctttactcactgcaaccttcgcttccaggttcaagcgattctcctgccccagcctcccgagtagctgggattacaggcgcgcaccaccacgcccggctaatttttgtttctttagtagagacggggtttcaccatgttggccaggctggtctcagactcttgacctcaggagatccacccgcctcggcctcccaaagtgctgggattacaggcatgagccactgtgcctggccatacttaactttttgttttctgtttacatttggtatttattacaatttctcataccaagatctatgaatattaaatataaatttatatgctgaaaaacagtaaaagagaagaaagagaagattgatagagaaatcgagtgtactaggaatctgctgattttatttgaaggcatacattttgaggttcagactcctacagagggatctttgttttaaagtggtgctttgaaatttatttagtgaacaatttttttttaaaggtcttgttgcagtaggagaaagagcacaaaagaggtctgggaacttctctgctgcaatgaaagatctgtcaggtgagagcacgtttttgaatttcctcttaccctaatcccaccttgaattcattatttgttgcagaagttggtggaaataatttaaaactgggtatttctcccccctgcaggcaaacatcctgtgtctgctttgatggagatctgtaataaaagaaggtggcaaccacctgaatttctattggtccatgatagtggccctgatcatcgcaaacattttctctttagggtaaatatgaatttctgcattaattatatatatttattaatgtgatgacttagagggtgaggggtaaacatgatcacaggattaagattctgttcatgggtggggggtttgtatttgtagttaagtggtggggtttttaaacactgaagggtgctttaatacgacttgtcaatgtcctattttttaaaaaattggaaaagggtaaaatatagtatacaattgttattttctagttgaatgtggggaattaatttaatacttttgtcagtctttttctcaatttggagacctgctctaatttgcagtccctttcccaaatgatttggttcttcgggttgagattataatttgacttacatagtatgggttttatatttttgtaaattatttttctagcatttagtgaaaaaatacaaagctaatagatattaaagtttgatgctgttcttattgtatgtttttcttgaataggtattgagaaatggagcccttaccagacccaattgtatgtttttcttgaataggtattgataaatggaagcgcttaccagcccagctttgccagccctaataagaagcatgctaaagccacagcagctactgtggttcttcaagcaatgggccttgtaccaaaggacctcatggctaatgccacttgcttcaggagtgcctcacgtagatagattgaggttttataataatcatttcagaattttactctgcatcacaatgtatttcctctttaatgttgtaaatatttggcaatttaagacattgtgtaaaaagcaatctgtaaaaacatctccaggctttgatttttgtaccatggaaattgtatttaaccatacagggttttggtatgtttatattgtttaccttagtgatgtatttgtttaagtggctaacatccaaacgactgtttgaaggcatcagagtaatcttcagtgtggaatgttaaataacgcttttatactgtattttgtactatgatgtaactccccttccttatggctaggctactgtaacacttgcctgtaatcagtgaagggctgtgcaccttgtactatttcacaatgggttctgctggacagataatgggccagtgttattgaggtgatcaagatctgttccacagggctaatgccaccatctcccctcaaaattttgtagaggttctaaaaagaaagtggtatgttgtgtgatgatcagcactaagtcctgcattcctgttaaagccacttgggtcataagaagggagtaaaaaatgaagtctgactagaattctattgcagaggccagtacatttagtatggcattgagttgtgatatagttttactttgatgtgcattttgaatttcagctacacctagatagacgtaaaatgataattaaaatgctgtaaccaacttatctaataaaattggcaaccagccactattttgttgactatgagaaagttaaaagtttatgttaatttttagggtctgatagaatatttcatgtgtattacagtggtattcatatgctatgtctctaaactttattttcaaaagcttaaggcccaaatacaaacttctctggaataaacgtggtgttttattttctgggttataaagtgaacaaatacttagatactattatttctttacccaatgcttttgatttttaagcacttttattttaaaaatgtgaattatacagtccccccctacacacacacacacacacacacacacacacacacacacacacacacacacacacacacacacacacacacacacacacacacacacacacacacacacccctataagcacattaaatactactttgccgtgacagctcagtgtacttcacaattcttaacactattctatgtggaatacaaaatgcctttttatctgaattaacatgcatttaaaaagttttagtatatgtgaaaataaaggaattataaatcagtaggaaagatattaaggtagaagcatcaccaatcaactagctcagtagatgttgtctgtatttattttctacctttatgaaacaagaacctgctaacaggtaaatcgtaaagtaacatatttttgccctgatgccattagtcacaatgccatggggtaactgctatgtgatttcccatttgcaaggaagcatattaattcagtttctgctcaatatacaattaggttgtagggatatagatatctcatttgagttatctgagtttttcatctttatatctaaaaatctaatctgaaaatagtaaaacacatttaaaaccttagatgctactgtagtaaaagttatgtttataaacatttcagtatattccttcaacttcaagaatcttgaatttccttgctagaaggcttttttcctcaaagattccttttaggcttactttggtgttcaggatctccaattataaatgtagtctctcagcaccacattccgtaaagatgatttcccaagtaacggtatttgactaagttgctccagagtgttagggtgcaaaccacagttagtaagctccttatgaacaacctcctgtggaaatgtgtgtacaagtcagtaaaaagcacattagtctttaaacacagaagagttaaataattactatggagactgacaaataaatggctgattaatgtgattcatcctattaatagaagttgatgctaagaatttttgtagtgacaaaatcccaaaatattaatggttataagtctagccaactgagatgcatgagacaattttaaaggtcttaattctaactctaaaaaccttaagtatgttcaaaattaaaggcaaatatggttaaatacccacagtgaattgtttccttaaactataaaggaatcaggtactattgagttttggatgcaagaggaaatgaaaaagctgcccctttttggaatgggaagttcttcagtcactgttaaaactatttggactgaggccgggtgccgtggctcaagcctgtaatcccaacattttgggaggccaaggtgggcagatcacctgaagtcaggagttcaagaccagcctggccaacatggtgaaacccccgtctctaataaagatacaaaaaatagccagatgtggtggcacatgcctgtaatctcagctacttgggaggctgaggcaggagaactgtttgaacccaggaggctaaggctgcagtgagccgagactcgcgccgctgcactccagcccgggcaacagcaagactccatctcaaaaaaaaaaaaaaattgtacttggactgaattcatgaaagctacctcacataaacaacttacagacattattccttcctctagtaattcataattaagtaacagtttaattacttgaaacacaatagtgactcagcataaatgactcaatttccctccagctagtttgaggaaactacaactaaaacagtctgctcataggtgtctacttaccatatcaagtactttgtccatttgcaggcagatgttaaatacagcagttggctcgtgtggatacagtactgcagagaaagatccactctgtgaagatttgagcagcatggtcagtgaatgcagagaatgaggcatgataggacctgtaatctccaaactaaattggtctctgtatccagaaagagcttgtgtcttcacattcacactccgtgccttcatgaaaatgtaaagaaaaggaaaattaagatcatctctcaaccttttgcctagccaaaaatatgttcaatatatttccatttggggtttcctctcttttaacaattatggaataaaactatttcccaagacatctaaacaatgttatgtgagtacaaatacttagtaaattttcagcaacctttccatattaagagattttcaggtgaagtatattccagagaataccattttttcatatagtattttatctgatttagtaatacactgtcaatgcagactattggaaaaacaaaaatttaaaatccattcaattttattgctaagatttagcatgtattttgtatttacatatataatttattatgattataatcccagcactttgggaggccaaggtgggcagatcacttgaggtcaggagttcaagaccagcctggccaacatggtgaaacctcgtctctattaaaaatacaaaaaaattagccaggcatggtggtgtgagcctatagtcccagctacttgggaagctaaggcagaagaatcacctgagccccagaggcagaggttgaagaatcgcttgagcccgttaggcagagtttgcagtgagccaaaattgagccactgctctccagcctgggtgacagagcaagactccgtctctaaatagatagatgaatgaatgaatgaatgaatgaatgaatgcagggcggccaggtgcagtggctcatgcctgtaatcccagcactttgggaggccgagggcagatcatgaggtcaggagttcgagaccaccctgaccaacatggtgaaaacccgtctctacaaaaaatacaaaaaaaaaaaaaaattagccaggcgtggtggcacacgcctgggtgagagtgagattccacctcaaaaaaaaaaaaaaaaaaaaaaaaaaaaaaaaaaaaaaaaagcagggcatggcagtcctgtggtccgatactcgagaggctgaggcaggaatttcacttgagcccacatggttgaggctgcagtgagctgtgccactgcactacagcaagaccctgtctccccaaccaaaaaaagaaaataaatgttcgtataatttaaaaagaggccaggagttcaagaccagcctggccaatatggtgaaactccgtctatactaaaaatacaaaaattagctgggcgtggtggtgcccacctgtaaccccagctactcgagaggctgaggcagaagaatcgcttgaaccccagagttggaggctgcagtgagccgagatcgcaccactgcactgcagccggtgacagagtgggactccctcttaaaacaaacaaacaaaaacaaacaagaaaaaaaaaaacaaaaaaaatagctaggcttggtggtgtgtgcttgtaatcccagctactcaagaggctgaggcatggcgcgagaatcacttgaacccgggaggcaggggttgcagtgagttgagatcacgccactgcactccattcagcctggatagcagcgcaagactccatctcgaaaagaaaataaaaaggatttcatataatttatatatttccacataatttctttgatataactgtcttatataatttttgtttctttttttaatgggaggaaagcaaaatgaaaatatgtaccaagtaaaaatgctaggaggtttttttttaaatcaagaatttatcctatcaaagtaaagtacttcttaaaagctaggttatgcagacttttattaccttaagcatttgcattgtggcacctcggaaagcaacaggggacaagagggttggaggaagtcctgcctgtggacctgaggtagcaactaaactcttagagttaatcaaaaaattgagcaatgtaaaggtgttgattccttttaccaacacaacagattcaggtctgtgatccatttgtacttcatgtttctctttacgcctgaagatgacaatcaaggaaattgcaaaagcaaatctcacctaatgtggaaagcagttatcttgattctgaatcacctgagactccttttctccataatgaaatggaaatcctcttgctacctctctttaccgaatcataaggcatatgtttcaatcaaaatgttaacaatctgaatttgctacaaactgacacctaaacctaatttcttctctagtcaaaacacacctattctcccacaatcataattgaacgttttgattaaaaaaggtttaatagttcaccatttgttgatacttaggggcttatttagtattacaatggagaattagttttaatatgacctgaagataatttaagattataatcatataaaactgccaatgttaaacttctcactaacgtcattcaatgaaaattaattctagttaacaacaactgaaaggatacagcttgatagaaagtatgtctggctttttaattttatcttgcacacccatctcttccagccaggaaaaactttcctcttcatcctcatcactgatggcttgctccctaggaaattgctacagttagagtccctatttcacaagctgttcctgtgcaaatctatttcatgagtccataagtcagtggatgatataaagttattttaatcacatactccccatatcccaagcttgttccagatgctgtctccttcttatggccactttcttttattaaaggcagagaaaattcaatacctatatgaggaacaaaaatgtaactgagttgtcatttaaagtatttaacaggcatgctgtacttttagagtgtaaaaaatttgaaatgttagtttttacaaatgatctattaaggcagtagagttttcaagctttcttcacaaacctacaaacatgcataaaacgtattctccttgaaagaggttcgggaaacaacacatacatgtaacactctttcataaatcatattgtattccagttcactttttgaaaaagtactgattgggcccattaagtagatttcatgatccactaatgggtttactcagtttgaaaattttgttattaaaggggtaattggtactatagaagaatttctagaagagtatattcagatagtgactatctggcccaatatgtgttttattttagagatcagagaacactatgtggaaggaacagtttaaatcaggagtccccaacccctggactgtggactggtactggcctgtggcctgttagaaaccgggctgcacagcaggaggtgagcgactgtcgagtgaacattactgcctgagctccatctcctgtcacatcagtggtcgcattagattctcacaggggcacgaatcctactgtgaactgtgcatgtgaggcatctaggttgtgccctccttataagaatgatgatcttgtccgggcgcggtggctcacgcctgtaagcccagcactttgggaggccgaggcgggcggatcacgaggtcaggagatcgagatcgtcctggctaacacggtgaaaccccgtctctactaaaaatacaaaaaattagccgggcatggttgcaggcacctgtagtcccagctactcgggaggctgaggcaggagaatggcctgaacccaggaggcggagcttgcagtgagccgagattgcaccactgcattctagcctgggtgacagagcgagtctccatctcaaaaaaaaaaaaaaaaaaaaaaaaagaatgatcatctgatgtgtaacagtttcatcccgaaaccatcctcctcactgcccatgaaactgatccctagtgccaaaaagtttgcggactgctggattaaataattgtgggggagggaaaaaaagccagaaataaagaaataatatatttcttaatgttgctaatcaactggtaaaaggcattttaaatttaaatagcttttaggccaaaataggtttactatatagtatagtattctcactttaaacctaaacttttaccttcatttctcatagcttctcttaaacctcgagttgttggagatatgagagctgtgattaagtcacttccagctaatcctgctgctcggaacaggacagtaaactgataggtacaaacgtagaaataggggcaaagttttgtcttcagcaaattatatagagaagtaaagctcacagacctatgaagtaaaaaaattttcttaaggtattattaaacatttaatgcaatgtttataattctgaataattcagtttgatacctggtttaaaacacaacacaaatattttagataatggttttaatttttgtggttacgtatgacttagctttaaaggactgaaattggttatgaggactcgctgatgacttctcaatactttaacaaatagtgtataccacttaaacacttattttttctttaaacaaaacttaattgagaattgcctgctgactttctctgagctgctgctaaaaaaggaagcagagactgacaagaagtagcattaaagaattagggctgcgtgtttatatatatatatatatatatatatatatatactttttttttttttttgagacggagtttcgctctgtcgcccaggctggagtgcagtggcgcgatctcggctcactgcaagctctgcctcccaggttcatgccattctcctgcctcagcctcccgagtagctgtgactataggcacccgccaccacaccaggctaattttttttgtatttttagtagagacagggtttcaccgtgttagccaggatggtctcaatctcctgaccttgtgatccgcctgcctcggcctcccaaagtgctgggattacaggcgtgagccaccacacccggcctgcctgtctgtatatatttaaccaacacttatatacattctaccacaattgggtaaagaatgagtaacagctaaaaaaaaaaaaagtaaacagtttatatgttggttattaataggttcagataaaattcacaaggatctagatacccttctgccattaacgtatccagtcacaaatatgatagagaatgctgctaaaataaaattcactattgaattatacaagtttctcttactaatcttaccagtcactcattaaaacatgctgcagggttgcatcatttgaccaaggacttgtctttccagccatttttctatcagctccaatacgagggaacagtggtagccaagacaaagcagggtggagccaatagataaggctctgctggaaggtacaacggagctcagaggagagtttgggatcctaaaatccaaaggtgacagtgggcagtttttgcccattgagaaatagagaattttattaaagacaatctttaccaaacacttaggtctaagaatctttattgctttctataggaaagcattaataattgttataggaacgaaaacatagtttatccttatttgagccagatgtaatggtaagccgtagtatcagaacatttaaacatagatgggaacattttcctgtttctaccatccttaaggacaatgactaccttttttatcatgaggaataggggtgggcatgtgtgtgtaggtaacactacatccaaccctctctccaaaaggctgttttaaaagtagccagtaaacactgatacggcaaatcacaaatcatcctaatctatttattgaaaagatgtataatataccaagacctttttcagggtaatcctttttaacctagtttgagactttaaaaaaatttttttaagatagtctcactctgtcactgaggctagagtacagtggcacaatcagagctcactgcagtcttgacctcctgggcttaaacaatcctcctacctgagcctcccaagtagctgggactacaggcacccaccaccatgctcagctaatttttttttttttttttttttgtagagatggggtctcactacgttactcaggctggtctcaagcaatccccccacctcagcccccaaaatgctgagattacaggcatgggctattgtgcccagcctcctagttttgagttgatgctttaaaataatcaaaatgtatatctctaaaaccattctagaactcacaaactccacaaaattcataaaatttttcttatacaggtaagaaaatctgtaaatccatcagcccttgcaatcccacccaattgcttttcacttctttctttgtattttctttctcaaaaagccttagagaaaaataatttaacaattcttgcctgcaacactgattaatttgcaagacaagtctctaaatgtatgagcagttactcaatctgacttaaaaaaaaaaaaggtatgaaagcaccataagcaccatctgggaaagacaaaacttcctgtctttgtatctttaaatttccaaagaaaaacttaatggaaggcagcatctgctattttgcaaaggagagcatttcacacttaatttgttactttaacacataactattttatttcagagttacctgtatacttttaggcaaagtaacttctgttgccctacaatgctggacaagaccttgagcttcttcctgtgctttcaaatgatctgcccaggtaaagggttgagaagaggtgaaaaggagtcgcgttttaatactccagtccacaggtaactcagtactttttgaggacggaatatcaggctcggagaatgatacatgtgaagtctttagaaaacaaagaatgcaaaaattagtcgagtatcaagaaaaaaccttcaacctaaagattttatcagctaacatgatcactgaaaagtaaaaatcatataagctgtataataaataacatgaaaaatacattacacactgtaaaaaagtctgaaaggagtcacactaaacttttaaccatggttacctatgggaagcgggaatttgttgttgggggtaggggtggtggaggggcagatttcactttttagtttttacagttctttatggtagtatagatgtttgtattgaagtagaaatattccaagtgttaaaacattttggatcttttaagcttctgaaactctgcatccagggctaacaaagcccatatttaagaaacatttcctgacttcaaatatttcccctcaacctgtctgcttcaggtcgacgttctccacaatacaagaatttttttttttttaaattgagacggagtctccctctgtcgcctaggctgagtgaagtggtgtgatctcggctcagtaccaacctctgccgcctaggatcaagcgattctcgtgcctcgtcctcccgagtacctgggactacaggcgtgccccaccacgcctggctaatttttttgtatttttagtcgagacgggggtttcgtcatattggccaggctgttcgcgaactcctgacctcaggtgtgatccgcctgcttcagcctctcaaagtgttgggattacagacatgagccactgtgcccggccaagcattcttttatatcacaataaaatatcagagaagggggaactatcttggatagaccataagaaggtcacttatttacaagagaaactgggtcttggagaactcttctagcctgttcccattaggacaaaccgcatttatcaaactacacagcacaatggtagtagttggggaatggaaacgtgtgtgtgttaggggagaggagcaacgaggttcagtgctatgccacaacctgtggaggtgggccaggagggctggctctgagtgatgaactggagaagtcaactgcccaaagaagagtggtaaaaactgttagagagtaaaagaaaacccccacgtctatcaggcctattttagcgctggctatctttacagtcatcattactgtatcaaaccaactcctttaccttggctgatgcggtattttcatccctggttgagatgatcaagcctctctgtaaaactactttccaagcaaaatgcttctgagaagtataaatgtatttttaaaaataggctcaaatcctatgaaaaaaaagtttatacaaatacacattctaatgatatttaaaaagtattacctgaggtaattcagtaacagttgttctttcaggaaacttctcttcccatagcaaatcattttcttgattagaatctaaaaactgaggttaaatatattctcctttaaaatttaaaggatgctgaagtttgcgttaaatatgtacagagcctcacctggcatacatgtttctcaataaacgcaagtacacctaaattcagaggcaccccatccaatctatgagtttcaacacttcagttttgtgtctgaactttagtatcaaaattgaggggaacagggaccggcgtttcaaaccgaaagatccaaaaggctttgggtaagacagatgctagtgaattctgaccccacgaatcctcgacattcccccatctccagaataatttggagtgcgtgagagaagggaggccctaaatcacgggggaagcagggcttgtcacctgccccatcgaacagcgtccttgcaagatgggggctctcagggtttttcgagctcttttccaagtcacctctaagtcctctccaaggggctcctcgctgccctctggggccccctcactttcctcgggaacgcgtcccgtgagcacagcccgcagcggggtagccaggggagcgctcttcccacaaacccggccttgccagaatcgcggctcccagggcggggtaccctaaggccacgggcggccgaagtcttcgcgcccatttccttgcctcgaacgcgaggactttccatcccccattcacagctggctcaacccacgaaagacaagagccccttggcggccaggctacaagacactcaccgggaccggggcctccggctgctcgcgggccggcccgtcggggggctccgcggcgacccgcggtcggttgtccaggcgggcgaaggggttcctccgagcagcggccgggccgccgccgctgccaccgcctctgccccccgcagcagggaaagggcgaagaggcagccccgccaccagggcggctcggcgggccgccggctccgtcagctcacggggcggggaggcggcagctccacggctccgggcccttttccgtcggagccgcactacctcgggcggctttcggaagcccggtgagtagccgggcaccgaaagggccatgacgcgcggcggctgagggtagccggccgccctacagagacttcccgcgcgcgccgggcccgcccctgacgtggcgcctcgccgagctcccgcccccgacgcggccccgcctccgcccccgccggttccgagcggagcatgcgcagtgggcagcccgcgagacgcagcccgcagcggcgatcccgggtggccgtcaacgcccactgtcccagcggtgaccctgccctggcgcttctgccaggtcctcggccagagtccagtcgccaggttcagcgacgcttctggaaagtatgcgatccagggcgctgatgtgcactaccctgtggggcaccgaaatagcttaactctatttaagcccgcagcagggatgtgatcagcccggggtttggcgcctggatgaaaaggaaacaaacttgagctgcggcgatgggctgctgcttccataaacttaagagagggcagtggctactgctctcaagaggcgaggagaggggactaggccaccttcctcaacccccagagaactcagataagacgtcagcacgcttcctatgccagcgcagcctaccgacatccctcccttccccgttcccagtgcctggtcatctcagacttccaggcagctgccactggcaagttaatgggatcttctttgatcctggggaaagccggagtgaatgaatagttgaaaacacaaaatttaagtgcctatgggctaagtcttttaagacttcaaaatatactcaaatgcttaaattatgacagcaaagacttaaggaaggtgttgagaacggagttgatacaaaattaatacgttactttgatagcttagcaaaggcctgcaacagcttttatcaagagtagtgtgacttttgctgaaagcagcagttttcttcatggaaggaattttatagcaggggcaaaatatatagaaacaatgaaaaggtttttagaaaaattcccttaagatgttaattatagaattatcttgatcatttgcacaagaatttttcaaacacttttcaaatgtgtcaactgagcatcttgtcttagcagagaaacgtgcttaaaaatgcaacttgttttatcttccttggtttttctcaacaatttccaaagaaaattctggcttcaaatactggaatatgttcatccgactgaggtctgagaaagaagaaaattaaaattgaacaacttgcttttttcttccttgatttttctgaacagcttccatggaaacttttgcctcatacagtggaatgggttcatccaactgaggtctgagaaggaatgaaattagaaatgtcaggtctagttaaagataagtagaacaaacagggtggtatatgacaaatgctagtgctcaaatctattagtgtattaattaattttttgagacagagtctggctctctcatccaggctggagtgcagtggcacgatctcagctcactgcaacctccggctcccgggttcaagcaattctcatacttcagcctcctgagtagctgggattacaggcatgcaccatcaagcctggctaatttttgtatttttagtagagatgggtttcaccatgttggccaggctggtcttgaactcctagcctcaagtgatccacccaccttagcctcccaaagtgctgggattacaggcatgagccactgcacccggcctcaaatctattactttaagtaattcaaacaaattcgtccattagtgtttccaatgttaaaagtggttaagttttgaaggaaaaaaattatctactttatttactccctctttttttctgagacggagtttctcttgttgcccaggctggagtgcaatggtgtgatctcggctcactgcaaccttcacctcccaggttcaagcaattctcctgccccagcctcccagtagctgggattatgggcgttcgccaccacgctcagcgaatttttctattttttagtagagacagtgttttgccatgttggccaggctggtctcgaactcctgatctcaggtgattcacccacttcagcctcccaaagtgctgggattacaggcgtgagccaccacgcctggcctactccctcttttataactgataaacatattcaactttaaacaaatataccatggttttctctccttcaagctattggttacttcaagttgctttgggaggggtgatgaggaaaagcaaagggtgaggtacactacataatggagtgaggaaaactcacaagccacttctatctctgcgagtacctactggtgtaccaccagatacactttgataaatattaaagagcagctatttaaacgaaatataagatcagtgcaaaagtaaatgcagtttttgccattactttcaatggcaaaaaccacaattatgtttgcaccaacctaataataaaatatggaggcaacaggtacatggcgagagctaaaacaaaagtgggactgcctgccttagctccctgaaaatagaaaaacaaacaagaacaatgatttggttactttagcgtacctgaaaacaccagttgataacttctccatcacatcctttaagatacgtagctggaaggattgttaaggtggcaatgtaaaggagaattaaataaaaccattcaataagcagaggatgccaggcaggccactttctcttgtttcaagttttgcactctcagagactcaacatgttaagttagagaaattctgtaggacgtcaagtttagctctacaacagggaaatgatttgagagttggtggtgtaatagagcctaaatttccaaggacaagtgacaagagcagcaagtcaagcctggtgcttatcctaagtgctcaccactattatctcaatggatgcgaatgaaatagtgtctagttttcatttctacactacatatggcatttttagttaaaaacaattttagcacgtatatatcttactttagatgtacattcgttgaccaggctggttggttaatgggctcaaaatttgtttgcagaagccagtaaactttatgtgtgtatgatatacagtcatccctcacgcatccatgagggattggttccaggacccccatgaagaccaaaatctccagatactcaagtcccttatagaaaatagtgcagcagcttgggaaacaaggctctctacaaaaaaattaaaaattagccaggcatggtggcatgtgcctgttgccccagctactggggaggctgaggcaggaggatcccttgagcacatgggtttgaggttacagtgagctggaatgagcactgcactccagccagggcaacagagcaataccctgtctcaaaagaaaaaaaaaaagaaagaaaaaaaaaatggcctagtatttgcatataaccgaggcacatctccattatacattaagtcatctctatattacttataatacctaatgcaatgtaaatactatgtagatagtggttatgctattttttttgttttttttattgtcgtattattactttttcagagctttttttttttttttttgagacaggggccccctctgtggcccaggctagagtgcagtggcatgatcatggctcactgcagcctcaacctctcaggctctagtgatcctcagcctcccaagtagctgggaccacagcaattcaccgccacaccaggttaatttatttttatttttgtatagacagggtctccctatgttgcccgggctggtctcaaactcctgagatgaagccatcctcctgcctcagcctcccaaagtgctgggattacaggcatgagccactgcccccagcctccaaatatttttgatccttgattggttgaatccctggatgtggaaccctcagatacagggggctgatcgtatgtcactaagagaatcagaaaatgatgtaaaaatcaaagaaaaaatctatcttgctaatttaattgaaattataatactaagatcaagattctatgtaattgcccgtacttctgaattatttatggcccagaatgacacagttggaaggagatgtctctgttaaatcacaagcagcaacttagcttgtatgaactgaatgaggagggtttgcacaagtgaggactactgtatgattcaggactttagaaaatgcaaattagggctgggtgcggtggctaacgcctgtaatcccagcattttgggaggctgtagcaggtggatcacctgaggtcaagagttcgagaccagcctgaccaatatggtgaaatcctgcctctactaaaaatacaaaaattaggtgggcatggtggcatgcgcctatagtctcagctacttgggaggctgagacaggagaattgcttgaacctgggaggcagaggttgcagtgagctgagatggcgccacttcactctagccttggtgacagagcgagactctatctcaaaaaaaaaaaaaaagaaagaaagaaaatgcaaattagcaaatataagtcatttaaaacatttctttttttttgagacggagtctcgctatgttgcccaggctggagtgcagtggcacgacctcggctcactgcaagctccgcctcctgggttcatgccattctcctgcctcagcctcccgagtagctgggactacaggtgcccgccaccatgcctggttaattttttgtatttttagtagagaaggggtttcaccatgttcgccaggatggtctcaatctcctgacctcgtgatccgcccaccttggcctcccaaagtgctgggattacaggcgtgagccaccacacctggcctaaaaatatttttaaaaggaaactaaagaatataaatttactaattcacatccctgcaagttcccttcctactgctgttaataaaattcttacctgtgtgcaaagcatgtatttctgattctggaaaatgtacagtatttcatatacacatgtcatgtttcaacttggtccaaggatttgtcaaataggttaaaattgccttctcatcgggagaggtggtttgagagaattaagttatatactataagcagagcagtctagtttccaacatgtaagattcaaaactaatagctacagccgggagtggtggcccatgcctgtaatcccagcactttgggaggctgaggcgtgtggatcacctgaggttaggcgtttgagaccagcttgaccaacatggtgaaactccgtctctactaaaaaatacaaaaaattagccaggcgtggtggcgcatgtctgtaatcccagctactcaggaggctgagacaggagaattgcttgaacccaggagttggaggttgcagtgagccaagctcatgccactgcactccagcctgggcaagagtgagactctgtctcaaaaaaaaaaaaaaaaaaaaaaaaaaaatcaaaactaatagctacatagtattctaaccttaactaatgttacttttgttaactgttacttttaatagccacatggtattctccactgtagcatcattccatgttattcttaataattacaatgttattggattggacatttacttttttttttttttttgagacagagtctcgctctgtagctaagctggagtgcagtggcgcgatctcagctcactgcaaccttcactgcctgggttcaagcaattcccctgcctcagcctctggagtagctgggactacaggcgtgtgccaccacacccaactaatttttttttttttggtatttttaatagagacggggtttcatcatgttagccaggatggtctcgatttcctgacctcgtgatcccccacctcggcctcccaaagtgctgggattacaggcatgagccactgtgccagctcatgtacctttttaaaaaatgaaattaattaaaaatccttttagaaagttaaatctaattttcaaatttaataggaaatatttaatcagaaataactttaaactcatacattcactacatgaaggggttttgaaatctactccttaaaacttaacacatgcagtatactaattacgtaactttttttttttttttttttttttgagatggagtctcactctgtcaccaggctggagtgtagtagtgcaatcttggctcactgaaacctctgcctcccaggttcaagcgattcttctgcctcagcctcatgagtagctgggattacaggcatgtgccaccatgcccggcctacataactaccttaaagctccgaataaagactgtcattgctcctggagggaactggcctttatacatatcacacatatatgactagacacatttaagaaaagtaacgtatgatattcagtagagagaagtgtaaggctatgtaaatctttcttcagacacacacatatgctctatcaagtaatgataactttttttttatccaatacattaaaacttttaccaagtgctgctgcctctaagccagtcattttagaaataaaaggaattcttaagttgaccctactctaaagaggtttgcacctttctttttgaaattgtttgtatattccaaactttttattatttttactcaactggaatgatttggcttcaatcacaccagacttatctctgaatgacttttgtttcaaaaagtcaaacctatcttcatttgataaagatttcctagcattgatatttataaaacactccacaaactctttaatttagaaaagtattctgaaatgtttctgtgcaatggcaccatcataggagtaagtgtgcaacctttcaaggtgatgtgtgctttccttaatgtgaggttaaaaacaaaatcttccaggtatcttagggctcatctctgttcagaaaggagagagactgcctgagtgtgattcttgctccgccacttgctgcgtccttgagtctgtatcaacatctctgtgcttctgtttcttcacctgtgaaatggggatgataacagtacttacatctcaaaaggctgttttaatgtttaaatgaatacttgcaaggcacttggaatactgtttggaatacttaaggaaacttaactgctattattatttcctattatcgtaatgaaagaacttagtacagtacaaagttcaagccagaaactcaatcagtcgataaaaaggatataaagatattttccctgttgtacatttgacaaattccaaacttcatcattcaggaaagctaacgttgctcccttgaggaaaaggcagtggctatctggaggatccaacttggatagaatgaaacaaagactaatcaattattgtgagtttaacagcaggatgactggtatctcgagtcagaaaaacttctacacaaattaaatgatgtccaaatcacaaaaatatgcacataaactttaataacgtaaacgataatattttctatttcatggtccaaaatgatgaaacagcgaggtgataagtacatggcagatgcaaggccaatctagaatcctggtggtgaagtggtaggggtgtgtgtgtgtcttttctggccatcttcatgagggtgttggaaaatcagtgaagattggtaggtgagaattacggtatttgcatatcagccatcatgtaaatatgtaactagaatgctgaaaaatataaccttgagagatacataaacatatatagtaattccaatttgaataattaggaaattgtgataattttatatagaaatattttgctaagtatatgtcaacaatgtcaccgagaaaaaatgctatctgaaatactattaaaaattcatgccagcgtggtggctcacacctgtaatcccagcactttgggaggccgaggcaggtggatcacctgaggtcagaagttcaagaccaccctggtcaacatggtgaaaccctgtctctactaaatatacaaaaattaactgggcgtggtggcgggcgcctgtaatcccagctactcaggaggctgaggcaggagaatcgcttgaacctgggaggcagaggttgcagtgagccgagatcatgccattgtgctccagcctgggcaacaagagcgaaactttgttccaaaaaataaaaaaataaaaaaataaaataaaataaattcgtaagtcacatgtctaaatcactaaataaaattacacttcatcgtcattgaaaggatgtctctactaggcagtatttcaacattttggccaacatgttgctaaagtgaaaaaaaaagctacatttctttctgatataaaatatggaatggaaaaaaaaagctaaatttctttatttttcagatttttttctttttttttttttgagacagagtctcactctgtgacccaggctggtgtggagtggcgcaatctcggctcactacaacctccgcttcccaggttcaagtaattctcatgcctcagccctcagtctctcaaggagctgggaatataagcctgtgccaccatgcctggctaatttttgtattttttgtagagatggggtttcaccatgttggccaggctggtcttgaactcctggcctcaagtgatccgcccgccgcggcctcccatagtgctggactcataggtgtgagccaccatgcctggcccagattttatactaatttagtcataccttgcctcaaataacttaggcattattgtttgttaattacacccctttggtgtaatggtaacgctttatggtttctgatagtacctgaaggttttcttctgttgttacccagtggcctccaacaccaagaagtgtgatgatatcatgtttatgtggtagtagttgtagttttacagctggttcatcatctttactatataatctcacttgcaagggaatagttttaaaaaaagagagagagaagaaatatattttataataatctgacaaaaatttattcttcaaacaagttcttatttatttagagacaaggtcttactatgttgcccaggctggcctggactccagcaatcctccagcctcagcctcatgagtagttgggactacaggcacaggccactgtgtccgccggcactctctttttgttttttttttgagacggagtctcgctctgtcgcccaggctggagtgcagtggcgcgatctaggctcactgcaagctccgcctcccgggttcacgccatcctcctgcctcagcctcctgagtagctgggactacaagcgccgccaccatgcccggctaatttttttttgtatttttagtagagacggggtttcattgtgttagccaggatggtctcaatctcctgacctcgtgatccgcccgcctcggcctcccaaagtgctgggattacaggcatgagccacagcacccagccctccttactttttaatgtacaaatgaggaaatatttttcttagaaaaagcaacacacaatgtattctgataccttaaaatctactttttgcattaaactgatcataaaatttattcaacatttaattgtaatttattgtaaatctacttattatagaaataaataaagataaaaagtctatcttcatttgaaaaccaggcaaagtaatgtaacacataaccaaatctgacaattaacactgatagcttaatatagtgagatgaattgattcccaattaaaaaactcatagactcaagatagtcttaacataattactgaaatgtccatgtgaaaaaatgatgcaataaagtatgtatttacttccactgacagattttcctgagctattttcaaatcttagaaaatactggtttaaaaaaccacactatagtcataaccatattcatccatgattctcacattagaagataaatcctaccaaagtataaatagaagcactttgcaggctcgtaaagcctatcctttagaagtcatgctattacttaagtgtgttcagagtaagtgttaaataaatactggttaaactaaaaacattcaagaaaagtgaaactggaacaaattttgatattttccaaatagagactgcagaagtcaactatccaatcgaaggcagccacacacagcagatgggactgaaaaggcatgagaatgatgctgtgttttctgggagccactgaggaggccatgtttctagatttcttgtagcgatatgtcatttgttactctaatgtctacaccaagcttgtccaactcgcagcctgcccaggatggcattaaatgctgcccaacacaaattcgtaactttcttaaaacattataagacatttttgagtttttttttttttttttggctcataagatatcattagtgttactgtattttatgtgtggcctaagacaattcttcttccaatgtggccagggaagccaaaagattggacacccctagtctacgctgtaaaagataagcatgttctctcttacatacagcgcttacaatgagaataaagtggaagttccaatttaaattaaaaagtcttcagttaaaaacaaaacctaaaactgaacatctggtttaataagtgcattaataattatgccctggttaaattttttttcttaaattcatcaaactaaaaaaactacacaggctactaatttcataaggtacctacctccagcatctaggacaatatctactcccaggccacctgtttcttccaaacagctttcagcaacatgaactttcccattagatacatcaatcactcgggctgtaaaggacaggaaatcaggcaattgtactgttctctatgtgatcaacacaaacaaatcagggaaaaagaaaaagaaaagcaaataaatatctattcttgaaatgagttaagcaattcaaacaattactgaatttaaagggagaaagtcaatttaaattatactttttctcatctaacccaatatgggatatagcagtctaaatgaagagacttgtatatttaataaaactaaaatgtgaacattttgtggagaaggtgatccaaggctggtctgttgacacagagcactattctctacagttataggatatgttgccagaattaggaatctgaaaacacagaggtacatatataatacgacatgaaatggaagattaagtcagtttctttttttttttcagacaggttctcactccattgcccagaatggagtgcagtggtgtgatcacagcccagtgcagccttgaactcctgggttcaagcaatcctcctgccctagcctcccaagtagctaggactacaggtacatgccaccacgcatggctatttttttaatttttttttgtagggagagggtcttgctatgttgcctaagctatttttgaactcttggcttcatgtgatcctcctgccttggcctcctaaatccctgggattatagggtgagccaccacccccagctagattaagtagtttctcaagtatgttcatatttaatagtctttagagctaaaaaacataaaaatatacagatgatatgctcatctttacgatgggctacatcccaatatacccaccgtaagtcaaaaatgcactctataccccaataaaccgatcgtaacatttaaaaaatcctaaatcgaaacactgtcagctggggacagtctgtatttgtataatatggtaattatctactagaggctgtttcaccctttctcagtcatagaaatctccctctcttccccacttactctcccaaatgaagaaaaatcttaaagctaaggaaaaggagcatgatttttaggcaagtcagtaaaaattaaacagattttaattggctgcattaaaggatattagtagtatcctattaatagaatataaattattgacagaattaaaaataattctcagaattttgaactggcaaataacaacatgtttgtatttcctttctctatctttcaacaccttctagctgaagagaattcctcttagagctgctcagattagtggtgtagtccaacagagtaatctaggacttggaggcaaggaggaagaggacaaaagggaaagggggacaaagcaatctaggaaaggcaaattaacaaataagaaattttcccttcgttcatgttcttttttttaataccattcatgcttttttttttttttgagatggagtctcgctctgtcacccagtctggagtgcagtggcgcgatctcggctcactgcaagctctgcctcccaggttcacgccattctcctgcctcagcctcccgagtagctgggactacaggtgcccgccaccatgccagctaattttttttttgtatttttaatagagacaggtttcaccatgttagccagtatggtctccatctctggacctcatgatctgcccgccttggcctcccaaagtgctgggattataggtatgagccactgtgcccggtccataaagttttttttttttttttttttgggggcggactgtcgctctgttgcccaggctggagtgcactgacacgatctcggctcactgcaacctccacctcccaggttctagcaattctcctgccttagcctcctgagtagctgggattacaggcgtctgccaccacgcccagctaatttttgtatttttaatagagatggggtttcatcacgttggccaggctggtcttgaactcctcacctcaagtgatccacccgcctcggcctcccaaagtgctgggattgcagatgtgagccaccacgcccagcctgtgctctttctccattctattttcagatctcttctttttccttttctcctcctttctccagcccctgtattgccttccttctatttcttggttatctctgtcacaagcataatgtaacagtggaaataatgtgagctttactgtcagacaggcctgggttcaaatctcattccagtcctttactaggtgtatatccttggagaagctagttctctgaggcttgtctctagttcttccacacccagcctgcatcaggtgtttctaaactgcatcaaagttcacctaattcaaaattaagtaaattgttgaaaacaatggggcaaacaggaaaaaacattgaaaaatgtaagtttaaaaaaaaataattaaaattaaaactatcacttaagtaaactggggctggacatggtggctcatgcctgtaattccagcactttgggaggccaaggtgggtgcattgcttgagctcagaagtttgataccagcctaggcaacatggctaaacccgtctctacaaaaaatacaaaaaattagctgggcgtgatggcatatgcctgtagtcccagctactcaggtggctgaggtgggaggatcacctgaccctggggaggtccatactgcagtgagccacgattgtgccattgtactccagctgggtgacacagtgagaccctgtttcaaaaaaaaaaaaaaaagcaaattgggagatagcacatacactgcattttgaaactgactttcatttgggattttataaattctttttttttttttttaagattatatatagatgaggtcttctatgttgctcaggctggtctcaaactcctgggctcaagcaatcctcccatcctggcttcccaaggtgctgaggttacagttgtgagccactgcacctggccagggattttgtacttggttttacaagtacatttttaaaggtgattttccttcaaaatttcctgttttaaagtctgtgctcataatattacccacctatgggaggtctgaatctttcaaggcactgcttatcttcaaggctgcatgctgttgaaatcactttggctcctctatgatgtgctaactgaatagctattgtaccaaatgcctgtgtagaaaaaaatatacagtgggtgtatggttatagaacagaggccatatcgaattgatttctttatattatttaataaagtataattctttagtgttactttagtatattttaaaatgttatctaataggaaaagagcaaagttatgggcaagtttaataggggaaatatttgattgactttcttctttacaaggggtggtggaaaagctgcatgtcacacgctgtcactcagtctgaccacagcacataatttcaaggatggagggccacattcagacacatggccttgcaaagagaaaactgggccttgtcaatgcgatggtctaagctaattatatactatatatgggagtccagctatctctctttgaagatcaaaacacttcaaaagctccatcctgttcagacctatagggtaagtttggggaaacactactatcctgatgttggatatcaggctgaagccagtgctgaagacagctttgccttttcttcaaagaaaagcaggaagaaagcatttcatcacaagccagttagaaaataaaactataagttaatttcaagattttcttaacatttttagatgacaatattttatgtattcttttagtgtcttgaactattttttgatatatgtaatatgtttaaattaggacgtgttgatcttttgtgtgatccatctatacataaaatgccaatacttgatcaacgtaagtgtgagggtgggaaataggctacaaagctattagggaattctggactatgacttcaaaggctcatgtggcatcttaggctttgtctaacaggaatgaataaaaatggcttgtctttttaatgtaccagcagattcaaagtcataaactaatcacactaaatctaactttgatcttctattgataaaagctgcttattataacaaaataggacactggaaaaaaagtcaatcaataagctattggcaaagaattatattagcaaatggatggctcattgctaaatttcctaagtttactgtatgcttgtctgtttcttaacaaaaccattagcacctacacttgctccatccattatcagcactgattttccaggagagagatgagaaagataatgcagagctgtataggcacgcactccatcccgaatgcttcctgctgcttccgtccatgtgaccttttctggtttatgaactatcataaagaacaagaagaaacaatctgttagcaagtcccacaagtcctacctcctggatctatttctctccatctctagtactactatggccctggtccaagcccctactcccattctctctcacctacaatactttccattatttgcccatgaataattctccatataggagtcagtgtgtgtgtatttttaaaactttttatattgtgaaataaaatgtgcagaaaaagtatgtaaaatataaaatatagctggatgaataaatataaaggaaatatgcaaagttaacggtataccatcctggtggagagagagcacaaccatcaccccagcagcctcttctctcctcaccaaaggtcaccaccattctcatgcaatttcttatttgtatcactcattagtacgcattcctaaacaatacaatttcctggcctggcgtggtggctcacgcctgtaatcccagcactttgggaggccgaggcaggcagatcacgaggtcaggagatcgagaccatcctgactgacacggtgaaaccccgtctctggccgggcgtggtggctcacgcttgtaatcctagcactttgggaggccgaggcgggcggatcacgagctcaggagatcgagaccacggtgaaaccccgtctctactgaaaatacaaaaaattagccaggcgtggtggcgggcgcctgtattcccagctactcggagaggctgaggcaagagaatggtgtgaacccgggaggcagagcttgtagcgagcagagctcatgccaatgcactccagcctgggtgacacagcgagactccgtctcaaaaaaaaaaaaaaaaaaaaaaaagtagccaggcgtggtggcaggcgcctttggtcccaactactggagaggctgaggcaggagaatggtgtgaacccgggaggtggaggttgcagtgagctaagattgcaccactgcactccagcctgggtgacagagcaagactccgtctcaaaaaaaaaaaaaaaaaaatttcatattgccaaggctttaaactttatctgaatggaatcataccatatgcattcttttctaccttgctttttatgttccatattatgtttttaaggcatccattctgtggatgaggctgttagagcactttcattcttgttgttttatggcattccaatatattaaaaacaccttcatttgcttacccattgtttagctgatgaacatttgtgttgtctccaatttttgtcagttacaaacaatgctgctaagtgtgttcgtatatgaaaaatattgttacaccgtgcatgggttttcctaggatacttaaattggagtggaaatcctaggtcccaggtatattatctgttccttaactacacctttccaaagtaattgcatcaatttactttcccacagtagtgtcctgttgctgtgaatgtccttgtcaacttgtggaatgatcacatttatatatttttaccaattatgtaggtaggtaatagtttcttactatgattttaatttgctttctctgactactaaaagaggttgagcatctttccatgttcactggccatctggaattccttttgtgaattcctttttcaagtgttaatcaatttttctattgttttgtctttttcttatttagagctttacaggaattctttatatattctagagaagtcatttgttcatgtgctgtaaatattattttcaactttgtgccttctgttttcaatctctttaacagtatctttaaaaaacagaatcatcagaatgatattttaaaaagataactgacatcctaacaattccctgcttaaaatttatcaatggctttacactgtacttggaaccaaatgcaactcctaatatagtttaaaaagttccgcatgatctgaccgtgaaactattccttaacatgtttcactatttaatttttgttttgtatttatgttgtacactgatgtaatttttccgcagtacaagaattcttttttttttgagatggagtctcactctgtcgccaggctggagtgcagtggtgtgatcttggctcactgcaccctccccctcctgggttcaagcaattctcctgcctcagcctcccaagtagctgggattacaggtgcacaccaccaggcctggctaatttttgtatttttttagtagagacggggtttcaccatgttggccaggctggtctcgaactcctgacctcaggtgatctgcctaccttggcctcccaaagtgccgggattacaggtgtaagccaccacgcctggccaagaaattctttctcattttacctaagatcaactttataacactttcacagtctttaccagctctttgaaatgcttcctctagtagcaatgattcatgtggactagccagagtagtcagcactgcatttagcaacaaactagtgccatctagtgggcgaagtggagcattcaaacatgcatgttgaaatgctcagacaagagctgagaattaaaacagtaaaaacatattaagcaccaggtgatagcacacacagtactttattccttaggtaactctttaagatagctattctcccaattttacggatgatgaaatagggttcagggtaattgattaatttgtctaatgccacatagctcataaggtgaatatatgactttaaagcacatctatttcaacagtgcacgctcaatcaacgtataatttacttattgggaacatcttctatcaaaaggattgggactaccatatttttattaaaaactcaatcatgttgtccttaaagaaatgctaactgcggccaggcaaggtggctcacacctgtaatcccagcactttgggaggccaaggtaggcagatcacctgaggtcaggagtttgagactagcctggccaacatggtgaaaccccgtctctactaaaaatacaaaaattagccaggcatggtggcaggcacctgtaattccagctacttgggaggctgaggcaggagaatcgcttgaacccaggagatggaggttgcggtgagctgagatcgcgccattgcactccagactaggtgacagggcaagactttgtctcaaaaaaaaaattgcatggttagatgtgggttaatgtcaacacacttgcttttgtgttgggggtccacaggtgtttattatgttataaaaactaaacaaataaggccaggtgcagtggctcacacctgtaatcccagcactatgggaggccgagacaggcagagcacctgaggtcaggagttcaagaccagcctgaccaacatggagaaaccccatctctactaaaaatacaaaaaattagtcaggcgtggtggcgcatgcctgtaatcccagctacttgggaggctgaggcaggagaatcacttgaacccaggaggcagaggttgcagtgagctgagatcacaccattcattgcactccagcctgggcaacaagagtgcaactccatctcaaaaaacaattaaacaaataaatgcgagccatatttcagcatctaagaattataatttgatctctttctagtttagctccaaaggaataaaaacaacaatgctgaaaattttgaatgaaaaataaaattagttttaggcttgacagaattgcttaagaactgaaaagtacaaaagagttggaagaattactctactctttaactctattatcaagtttgagaaataggactaacaccacattttgggggaatgtttgaaacatagctctttggtttggtaaagaacagacttatttgagttgaaagtgactgagcactgagcactcattaaacaatcatgaaggctggcatagtggctcatacctgtaatgccagcactttgggaggccaaggcgggaagatcacttgagctcaggagttagagaccagcctgggcaacatggcaagacagtttctacaaaaaaaagttagccagacatggtggtgcatgcctattgtcccagctacttgggaggctgaggtgggaggatctcttgaacccaggagtttgaggctgcagtgaattgtgataattccacttcactgcagcctgggctacagagtaagaccctgtctcaaaaataaacaagcaaacaaaaaacaaaacaccaaagacaaattaaaaataaaaacaaattatatacaaaaaaaatcaccaggaaagtaatagaaactaaaatagagttgtggtgaactgaaagttttcccctacaaacttgccgggaaactgaaattattcccttttacaaaaggttggagctacaacagagattacaggttattcagttgagtgtcctcatttatagatgcagtcagcatgcctaggatctagcctaaaggtcacactgttagtcatcattcttttttttttaaacattgtaaattgacaagttataattgtataaatttatggggcacaaaatgatgctatgatttacgaatacaatgtggaataattaaatcaagcaagttaacatagccatcatctcaaatacttaacatattttatgatgaaaacatttgaaatttactctcagcaattttgaaatgtacaatactctattattaactatactcaccatgctgtgcaaagaactgaaaataaaaacatatcccttggctgggcgcggtggctcacgcctataatcccagcactttgggaggccgaggtgggcaggtcacctgaggtcaggagttcgagacgggcctggccagcatggagaaaccccgtctctactaaaaatacaaaaagtagccaggtgtggcggctggcacctgtaatcccagctactcgggaggctgaggcaggagaattgcttgaacctgggaggcggaggttgcagtgagccgagatcacgccattgcactccagcctgggcaataagagcaaaactccatctcatgaataaacaaataaataaaaacatatccctcctgtttagctgagattttataccctttgtccatcaacactccattctccccagcccgcagcctctgtagccaccattctactctctgcctctatgagtttgttttagattccacatagaagtgagaacatgctgtatctgcctttctgtgcctggcttatttcactcagcatagtgctctccatttccatctgtgttgtcacaaatgacacaatttcctgctttttaaaggctgaacagtattccattgtgtatatctatatcatattattcattcatctggacacttaggttgagtccacaacttggctgttgtgaatagtgctgcaatgaatatgggagtgcaagacatctgatttcaaagcttccgggaaaatatccagaaggaggattactgaatcatatggtaattctatgttttgatttttgaggaacattcatacactttccataatgactgtactagtttacattctcaccaatagcgtacaaagtttcccttttctccacattctcgccaatacttacctttcatctttttggtaacagctattctgacaggtatgagatggtatttctttgtggttttaatttgcatttccctaatgattactgatgtcgagtattttttcacatgtcttcttttgagaaatgtctattcaggtcctttgacccttttctaattgtttttttcttcttgctgttttctgagctccttctatatcactatattaaccccttatcagatgtacggcttatcaacattttcccccagtctgtaggctgtctctgcacactgttgtttcctttgctgtgtaagagctccttcttaaagtactactttttttctgagacaggctagagtgcagtggcgcaaatacagctaacagtagcctcaacctcctaggttcaagcgattcttccttctcagcctcccaagcagctgggactataggcacacaccaccatatctagttattatttatttattttttttatttcttgtagagatggggtttcaccatgttatccaggctagtctcggactcctgagctcaagcaattggctctgccttggcctcccaaagtgctgggattattggtgtgagctactgtgcttggcctagtactttttttttttaaacaaactttttgttgagatgatcttgctatgttgcccattcttaaagtctttctttccttctcttctcttttcttttcttttcagacagagtctcgctctatcgctctgttgcccaggctggagtgcagtggcgcgatctcggctcactgcaagctccacctcccaggttcacgccattctcctgcctcagcctcctgagtagctgggactacaggcacctgccaccacgcccggctaatttttttgtattttttagtagagagggggtttcactgtgttagccaggatggtctcgatctcctgaccttgtgatccgcccgcctcggcctcccaaagtgctgggattacaggcgtgagccaccatgcctagccttttttttttttttttacaaaattttatttgctggtagagacaagcaagttgccaaggctggtcttgaactcctgggctcaagcaatcctcctacctcagcctcccaaaatgttgggattataggcatgagccaccacacccagccttaaagtacttattttatgctattttatttttttgagacagagtcttgctctgttgcccaggctggagtacagtggcacaattttggctcacctctgtctcctgggttcaagcgagtctcgtgcctcatcctcttgagtagctcggactacaggcatgtgccaccacagctggctaattttttatatttttagtagagacggggttttgtcatgttggccaggctggtctcaaacttttgaggggttccacctgccttggcctcccaaagtgctgggattacaggcatgagccaccacgcctgtcgtacttcttttaaagaaacattttgctgtgttttcttcctcaaggaatatctgcaattgttttctctatatactttaatggatttctggactttaatccatcctcctgatttataaataaggtagaagaaaaaggccatttgtgtggtttgccggtcttagcttaaactttatagctagaaaatggatgctctaatttgcttttctccttctggtccatgtcataattctccagtgttcatcagtgcctaaaggaatgggccttgtttggttgttttttttttttttttttttttttgagacagagtcttactctgtcaccgaggctggagtacagtggcactgttggctcactgcaacctccgtctcctgagttcaagcgattctcctgcctcagcctcccgagtagctgggattacaggcgcccacgaccatgcccggctagtttttatatttttagtagagacgggtttcaccatgttggccaggctggtctcggactcctgacctcaggcgatccacccatctcggcctcccaaagtgctgggattacaggcatgagccaccgcgcccagccaattgttgttgtttttaataatttatcttctatagcaatttagttttggttacttaatgaaaagactccatattcacaacgtactcgaaagaacagggcaataaggccaaccattcaaggaaactctggggccaaaaataggatagtttcctgtaaaggagcccgtggcagtcctcaaatttcaaactgcacaatttcaagatagctctggattagagactctcactgcgtggtatttgaaagaggtctttatctttcaaaggaagacacacacttggctcctcactaggcttcatgtacgttccaataagtgcagccctcagatctctgaaaaagtgtcttttggaaattaatttttaataaaataataaagtattattggaaattttagatataatgaatgacattaatttaaataaaaattactttaaatttataattttagaaatgaaatgccaaagatttggtagcctagctcaagttactgtaaggacttaactgagtaagattactatttttggaagacccaaatccaaattagcctctgtccccaaaaggtctgattagagatcacattatttaagaaaagaacttaggaaaaggtttaattcaatagttcaagaacataagagaaggtatttgctactatggatatggtatgaagaacataatgaattccagcataagaaatatatgctggctgtaccactggagtcctggtgtatccactgaccacatcttcctcccctgctcacacaggtaacttccacccaactttccatcctctaccttttctctatatccttaaataacatatgcttaattttgtacatttttgaactgtatataaataaatggcatgggactgtttgtattcttctgtaacttgcttttttcactcaatgctgtttgtgagagtcatccactttgatatgtttagctcttactcattttcactgctcaatagaaattcattctatgaatattttcaattatctatttgcttggtgatggacatttgggctgtttccagtttctttcactattacaaataagctgctatcaactcttatgcagtatgcctcctagtgcacatcaaatttccataggctacatgagtggaattactaggtctggtatatatacatcattaattagataaagctaaattgttttctaacatatttgtaccaacttacactccagcacatgaaaggttccatcattccacatccttcccacactttgggatggtcattttttttttttttttgagatgaagtctcactcttgtcacccaggctggagtgcagtggtgccatctcggctccctgtaacctccacctcccgggttcaagtgattctcctgcctcagcctcccgagtagctgggattacaggcgtgcgccaacagcccagctaagattttttgtatttttagtagagacagagtttcaccatgttggccaggctggtctcaaactcctgacctcaaatgatctgctcgcctcagcgtcccaaagtgctaggatcacaggcgtgagccgctgcgcctggctgatggtcagactttttaacttttgtcagtctggtggatgcataatgttatctctaagtggttttaattgctttcccctgattacttaggagatgaagcaactgtttaatatggtttcatgaagtgtgtgtgtgtgtacatgtactttaaatattcaaaaaataaattaccataagaaaaattaaaaacgaatatttcagttaaactcaacactagtcaaaagatattagaaaccaaagataagtgctctttttttttcttttttgagacagagtctcgctctgtcacccaggctgtagtgcagtggtgcaatctcagctccatctccagagttcaagcaattctcatgcctcatcctcctgagtagctggaattataggtgcgtgtcaccacacccagctaatttttttgtcttttcagtagagaccaggttttgctatgttggcctggctggtcccaaactcctggcctcaggtgacctgcccaccttggcctcccaaagtgctgggattacaggtgtgagccaccacacctagcttgagatgagtgttcttgattctttcccgtctcaaactctccatgtactgtctaaattttatatgttttttgtttcagtcaataaccaagagtaaaaaaaaatttttaattctgattaggtatataatttaagagccaagagagaaatcacttttcaaagatcttaccatgagcagtgttagtaaaacttaaaggtctatatattgtttagtctgaatatgaattttatgaatactaattataagctagaagtattcacatgaccagccaacattttttacatacatgactggctaatgatactttattaagtacaacacttatggtagattcaaaaaaattaaaatgttattaaaccatatgtcagtgaagtaagacttatgtgagctccaaagtactgaattgctacatacccaagtaatgctcatgtactctaacaacttcacaaagtccagggtcttcagagtccaggggcaaaattcctaaaaatcaaaacaagaaattaaagggatgtaagtcaaaaattcattcctaatgagaggccagtattattacaaattttgttcagtgaaattttgaggaaggttccagtaattactagtgtggacaagaaaaaattcagaaatgggatgggaagtgcactgtgccactcctgctatcgctttcttctttcccctctgagtgacagtaagatgatggctgatgttatagaacaaagtcagagtcttgggagcatctggactccttgttaaaactctccctgatgggctgggcgtggtggctcacgcctgtaatcccagcactttgggaggccgaggcaggtgaatcatgaggtcaggagtttgagaccagcctggccaacatggagaaaccctgtctctactaaaaatataaaaaattagctgggcatagtggcaggcgcctgtaatcccagctactcaggaggctgaggcaggagaatcgcttgaacctgggaggtggaggttgtagtgagctgagattacaccactgcattccagcccggccgacagtgcgagactctgtgtcaaaaaaaaaaaaaaaaaaaattgtccctgatgggttgggcatggtggttcacacttgtaatccaacactttgggaggccaaggcaggaggattgcttgaggccaggagttcaaagccagcctggtcaacatagtgagacctcatctctacagaagaaaaatttaaagattagttggatatcatggtatgcacctgtagttctagctattgaggaggctgaggcaggaggactgcttgagtccaggagttcagggctgcaatgagccatgattacaccactgcactccagcctgggtgacaagagcaagattctgtctcaaactaagaaacaaataaacaaaattgtccttgatgcatagctaccttcctatagtttggttccatgacatacctcagtatgtttcaattctttttttttgagacagagtctcgctctgttgcctaggctggagtgcaatggcgcgatctcagcccactgcaacctccgcctcctgggttcaagcgattctcctgcctcagcctcccgagtagctgggattacaggcgtgcaccaccacgcccagctaatctttgtattattagtagagacacagtttcaccacattggccaggctggtctcgaactcctgatcttgtgatccacccacctcagcctctcaaagtgctgggattacaggtgtgagccactacacccagccagagtatgtttctaataaaatcccatttttcttctaagctagtctgattttgtttttggtttctcacaaaaagaatcttgaataatacagagtgccactgatttcctgagcagaataaaaagacaagaaagaaataatcaattctccaggataatgcctgagtcaaaggcaatactataaaaagctgatgaaaactttcttacaaatctatcctttaagaatttcaagcatgctataattttaacgctataaggctaaatattttttctttcttttctttctctcttttttttttttttttttggacaaggtctccctctgtcaccaggctggagtacagtggtgtgatcatggctcactgcatcctcaaacttccaggctcaggcgatctcccacctcagcctcctgagtagctgggaccacaggtgtgtgccaccacgcctggctaatttttgtattttttatgtagagtcgagcttttgcaatgttgcccaggctggtcttgaactactgggctcaagtgatcttcctgtcttggcctcacagagtgctaggattacaggtgtgagccaccacataatatatattatatggccctatataatacaagttatataaatgttttctaactttatgtcttccacagagaaatgaaaatttcaaggattactataaaagtcatagcctatgtttgtgtgactgtctaggatgcaggttgcaactataaaagtcatagcctatgtttgtgtgactgtctaggacacaggttgcaaaattgcaaaaatactgtggattttaaaaaacaataaaagttttaagtcaatttttagttttacaagagttgtaagagaaaagctctgtatgatttcagttgaaacggtgcatggagcttctatatggcccagtcagtcagcagccttcaagcatgtgacttgtaactttccttctccctaaagacttcagtctggccacagactaagcatctgccagaaaaaggctacaccaagcactatagcaactatgattatctttttatctataaaactgttctacagctaaatatatatattttttattatactttaagttttagggtacatgtgcacattgtgcaggttagttacatatgtatacatatgccatgctggtgcgctgcacccactaactcgtcatctagcattaggtatatctcccaatgctatccctcccccccccaaccccaccacagtccccagagtgtgatattccccttcctgtgtccatctgatctcattgttcaattcccacctatgagtgagaatatgcggtgtttggttttttgttcttgtgagttttaaatgttctgctattgcaatcaaggtcccaatttttatcatcaatagaaatttgacagtaaattccaaaaaccaggaaagcatttctttctttctttatttttttgagatggagtttcattcttcttgcccaggctggagtgcaatggtgtgatctcggctcaccacaacctctgcctcctgggtttaagcaattttcctgcctcagcctcctgagtagctgggattacaggcatgtgccaccatgcctggctaattttgtatttttagtagagacgaggtttctccatgttggtcaggctggtctcgaactcccgacctcaggtgattcgcccaccttggcctcccaacgtgctgggattacagacgtgagccacagcacccagccgggaaagtacttctatatgaagcaaggtcacagtgaacattaatagttatatagaaaaaacagagatgacggtaaaatagatgacttgaaataagactatgaactataacttaccaactacttcatcatctggttgaaagaatgataccttgcttccaactaaagagtgaagaaaattaatagttaatattacaagtttattaaatataattcttatctattaaaatacatttttaaaatctgtggatttgtaaaaagactgattttgtttaatgtggaaaaaaggaccaaaatgtcaataacattttgatggtctgtaaagactacaggatatacagcacttcaaatctggattctctagatatttgggccatgcgattattgtgaccaggagaagtatctctctctttgcctatttagttgactttattcattttttttttgagatggagttctgctcttgtcaaccaggctggagtttgtggcacgatcttggctcactgcaacctccacctcccaggttcaagtgattcttgtgccccagcctcccgagtggctgggactaatggcatgcaccatcatgcctggctaattttgtatttttagtagagacagggtttcaccaccttggccaggctggtcttgaactcctgacctcaactgatccacccgctttggcctcccgaagtgctaggattacaggtgtaaaccactgtgactggcctctatttagctgactttaaggaagaaggagtaaagaaactaatctattctatagcttctatgataattatattgttttctactcctcctgtggctagcccaatctgtctttatttttgttgcagaatctcatacaacagggaattctgagaatgcagcaggacaagccgcagacaaaactcttcagacactgagttaaagaaggaagggctttatttggccgggagcttcggcaagactcacgtctccaaaaactgagctccccaagtgagcaattcctgtcccttttaagggcttacaactctaagggggtccgtgtgagagggtcgtgatcgattgagcaagtagggggtacgtgatcgggggctgcatgcactggtaatcagaacggaacagaacaggacagggattttcacaatgcttttccatacaatgtctggaatctacagataacacaaccggttaggacaggggtcgatctttaaccaggcccagggcgtggcgctgggctgtctgcctgtggatttcatttctgccttttagtttttacttcctctttctttggaagtagaaattgggcataagatgaggggtggtctcctcccttaagaagagtgacgttaaaattactttgatttgggaaataaattcaggttggtaccaagaagttttctggaactttatagaaatgatggccgggcgcggtggctcacgcctgtaatcccagcactttgggaggccgaggcgggtggatcacgaggtcaggagatcaagaccatcccggctaacacggtgaaaccccatctctactaaaaatacaaaaaattagccgggcgtggtggtgggtgcctatagtcccagctacttgggaggctgaggcgggaggatagcgtgaacctgggaggcggagcttgcagtgagccaagactgcgccactgcactccagcctgggtgacagagcgagactccgtctcaaaaaaaaaaaaaaaaaaaagaaatgatatagttacattttctctgcatatgtagagaaaaagcctcgactatcagtcaattcatttgagtagtttcattcaatgagttacaagaggaaaggggaggaaaaaactccaaatattgttgaatgcctccttgtgcccagcattgttgtgtgtttatgcatttaaacttcacaatgtaccaataaggtaggtattattatttctatttaacagacaaggaagctgacatgaagcggtgaagtaagctggaaacctgaatctggaaatggcccctttgactggctctgtcaacaaaatggccccagagtgcatttgttgccactagcaagtaattcgaagcctggtatttctactttcaagtctttcttttggagtttgcttcttctttggctccctcctgtgccatcatcccccaatccttttggcttctgattcactatacttttatctttcccttctactgctgatccctgtcctcctaaggtcactctgactctttttttcttggtttctttcatactcctcttcttttaattgaccctcaaacagtgcattccaaagggttctttgtttacatctctcctccttttctactctatcccttggagaactcatcaattctattatttcaaatacaacctacatgctgacatttctcaaatatgtactttccagcatagatctctcacccttgagctttaactcatttaattgcttactagatattgccagtgagatgtcacttaagttccttgaactcagtaagtataaatctaaactcataatattcctccaaattggatcatcttcctttatcaaatgttggttccaattcaagcctgaacaagaactctgtaagccattcctggttctgatctgtttttaatttcccagttactaggtcctgcagactttatttcctcaatatgtcttgaatccatccctcttctccacctctgccaccactgttgaggttatggactttgctgtttcttgcctcttggtctacaacccaaccagtcctcttgcctttagactcgtttgccttacatccacccttccttcaaatgcctactctaataatctccctaaaatacaatctgatatctaaggctcaaccaaaggtctggcccttgcctatcctcctgcttcattttaggaaggcaggaattagtgttcacataatcatgaaagtattttgtacaatatcttttattctgcaatattcgaaggataatttttttttctttttcttttttttcttttgagacagggtcttgctctgttggctcaaactcctgtgctcaagccatcctctcacctctgcttcccaaagtgctgggattacaggtgtaatccaccaagcccagcctaggaggagaattttcttgacaaaatgtttctctgctaccaagtaccatacccttgacgcctgcccaggactttatcttgctctagcaataccaaactctttgtaattcttatacacatcccactttcacttgcttgtctttgctcataatatcctccctgctaggtgtgattctcaacatgcttgccccttatgatttggacatcttactccaagacgcctttcctgtttcttctggccaggttaagcaactttcttccaagcttacataataatctgctcatgtgtatatttgtctctcccctagagagtgaaccgtttaagggcaaggagttcgtttcacttatatcctaagcagttagcaattgctcattaaatgtaaaatgaatgatcatctagttattgtatttatttttctacagtctgagaaaaaagaaacataattatcatttagctatgtcagaagattacatagagtatcaaatctattctacgttaaaatcccaggtaaaactcaaatatactctaacataccttaacacatttattcattcgcataggaggtaaaagcaaacacgttaatcatgaaccacctgttagtgaatattaagtataggtctatttagaaacaaattatatcaaatgcctgatataaggcttactgttctgtatgtaaagatcattatttcatcataaaaagacaatattggtcattctattcaatatatgattacttgtggatttaaatatataacccctaaatatttaccactgtaataagctcttcacttataaaataccaattgagtcctatttttcttttcaattaaaaaaaaaaaggggccagggatggtggctcatgcctgtaatcccagcactttgggaggccgatgtgggcagatcacttgaggtcaggagttcgagaccagcctggccaacatggtgaaaccccgtctctaccaaaaaatacaaaaatttgccaggcatggtgatgagcgcctgtagccccagctacttggaaggctgaggcagagttgcttgaatctgggaggcagaggttgcagtggagcagacatcacgccactgcactccagcctgggagacagagtgagactctgaaaaaaaacaaaaacaaaacaaaacaaaacaaaaaccaaagaagctagacaaagccaggcataatgtcgtgtacccgtagaccaggggtgtccaatctttttttttttttttttttttttgagacggagtctcgctgtcgcccaggctggagtgcagtggcgcaatctcggctcactgcagctccgccccctggggttcacgccattctcctgcctcagcctcccgagtagctgggactacaggcgcccgccacctcgcccggctaattttttgtatttttagtagagacagggtttcaccgtgttagccaggatggtctcgatctcctgacctcgtgatccgcccgcctcggcctcccaaagtgctgggattacaggcgtgagccaccgcgcccggccggggtgtccaatcttttggcttccctgggccatactggaagagaaagaattgtcttgagcaacacatacaatacactaacactaaatgacagctgatgaaccaaaaaaaaaaaaacatcatgtaattttttttcaaattaatagatttttttttgagacagagtctcgcacttgtcgcccaggctggagtgcagtggcgccatctcggctcactgcaagctctgcctcccaggttcacgccattctcctgcctcagcctcccgagtagctgagactacaggcgcatgccaccacgcccagctaattttttgtatttttagtagtgacggggtttcaccgtgttagccaggatggtctcgatctcctgaccttgtgatccgcccgcctcagcctcccaaagtgctgggattacaggcatgagccactgcgcctggccaaaaaatcacataatgttttaagaaaattcacgaatttgtgttgggctgacttcaaagctgtcctgggctgcatgctggttggacaagcttgctgtagacttagctactcaggaagctgaggcagcaggattgcttgaacccaggagttaaggctgtagctatgatcaggctgggcaacacagagagaccttgtctctcaaaaaataaaaataaaaataaaaaaggacatgttcatataattaaatttaaatttgaaaggctgtatataattttatgtaccagtaaaccaattagctacatttaatctcttttaccttagaaaataaatacatatactcacatctgtatacttaccatctaatacaattccagcaatttctctcccaacaggaaataaatcctttttcatcttcatttctgccagaagctaaatcatgacaaaggcagttaacatactattgtcagaagaaatcctggactccattatatatgaggaaagcgagagtaaaagtcaaatcacagaaagagcaaatatggttcaagttttggaactgagacaaagcaaataacttcacaaaataggtttctctaaagggtaggaaaccaagaatttactgaggcattagttgttctgcaggacttaggaatgaatattattattcaaattaccattaacatcctttgtttaacatctttactctgccaagtatgaagggaaattatggccaaaacatttcttgattggctaaacactatcagtcatcttactcaggtgaagggagggtagtctggagagaagactgttgaataagggggtgtggccaatgagaacaaagggttctccattcctataccctttaaaatcacctgagttctcaaaagccttgggttagggagtgggtgagaagtagtgatggatattaacaggtaatctgccatataatttcagattcatggtgactggagtttcttttggttaaggctaaatttttaagagattggtattttattagattgtgaccaaattaactgtaagtacttgtcttttgaagtaacagggtatactgtctttaagcccgtggtttaagctcctggcacttaacactacagatgctgaacgtatttgtagataccacaatattttaggaacagtaagtaaaaagaaattaattctcttctatatttatttttcaattttctgatctcctgtattgtatacttgatggtcagaagtctctttttcaatgtggaacataatacttttcttaagatgttcatatgacattcttatagaagtactgggtgttttacagtgtttcttttctattttttttttttttttcagatggagtctcactctgtcgcccaggctggagtgcagtggtgtgatctcggctcactgcaacctccgcctcccaggttcaagcgattctcctgcctcagcctcctgagtagatgggactacaggcacgtgccaccatgcccagctaatttttgtatttttagtagagatagggtttcaccatgttggccaggatggtcttgatctcttgacttcatgatctgcctgcctcggcctcccaaagtgctgggattacaggtgtgagccactgtgcctggccacagtatttcttttatgcacatttgtatggagttaaaactatggttttagcaattgcatcctggctccttcacttaccataagcattttcttacattacccacacagttttcataaccattatgcttaacagatgtgcaatatttcattcaaccgattttactataatttactatttatttctgttagacaaggagattatttcttagacttggattttaatggatttttccattttaataaaaacatctgaaaacagaagtctgcagacaaggtctagtactagtactcttgtgaaaagacttcaggggatcccactaatgcatttctcaagtcatgctcatgttacagagttgcccagtgaaagcctatacctggtctgtaatttcctaagtgtgactttatcaaagaagacttttaggttcctaaaaattatagtcacattataatccaataagttacgggtcatgtaaactatggcattaatcctaaaaaataaaacaaaacaaacaaaaaaacggagtaaatggacctgctcaatttatcatggcacatttaaccacagtttatttaccactgaaaacattctatgtatttcatggtcaataatgaaagattactgcagggtaatgtgaggtaaagatgtatgtttatgagagagcgacacaaaaagaaatgacaagagaaatatgaaccataactagtaatattagttaaatatctaattggtagctaataaactgattaggtttctagtttctattttattatttatttcttccttaataataggctttgttaattataaactcttagttttttgcaatgtaaaggagtttataaaatattataaaatatttacattatgtctgttttcttataaaatatttgtattttcatataaaatacgtaacttcaatcagactaataatgtcccttatatagaaatatacaaaagcacactaaattttttcccctagctgttctattctaaagatggtaggctgggcgcagtggctcatgcctggaatcccagcactttgggagaccgaggcaggtggatcccctgaggtcaggagtttgagaccagcctggccaacatggcaaaacccatttttatgaaaaaacatacaaaaattagctgggtgtggtggtgcgctcctgtgatcctagctactcaggagtctgagacaggagaattgcttgaacccaggaggcagaggttgcagtgagctgagattgcaccactgcactccagcctgggcaacaagagtgaaactccgtctcaaataaaaaaattaacaaaaatgaagatggtaataaattcttcacattgagaggtcagttatcgttatatttatacactaaatacactaagaaactctcattttactttgtgccataataaaagaaccaatacctttgtatttatctggctcagagcacaagctttaacttgaagtttcacaaagttatcctctgtaacaggaagatcttcctagaaccaaatgataacaaaacaatatgttattttacacattcctatgagaatatgtctttatgctgtgaaaatttttacatgtaattaaacaaaattagacagaccctaaatctcacagctaattttaacaactataagtaattatagaaatgtatataataaaaaaataaagaaaatttgggggtacaattttaaaaaagcttttggatacatatttttaaaagtactcaaataacaatatggatatatatgtagacaataaagttaggataacaaagtaaagcagcaaatactgtactcctttatttcaacctaaataatctcagaacaccggctcttcacatttacagggatatccttaaacacatatacacataacgtataacctttactgatttttttttttttttgagacagagtcttgctctgtcacccaggctggagtgcggtggcgcgatctcggctcactgcaagctctgcctcccgggttcatgccattctcctgcctcagcctccacagtagctgggattacaggcacccgccaccatgcccagctaattttttgtattttcagtagagacggggtttcactgtgttagccaggatggtctcgatctcctgaccttgtgatccgcccgcctcggcctcccaaagtgctgggattataggagtgagccaccacgcccagcaggcctttactaatttttagaatttcctttttttgttggttttgttttgagacagggtctcactctgtctcccacgcgggaatgcagtggcgcaatcacagctcactgcagcctcaacctccaaggcttaagtgatcctcctgcctcagccttctgagtagctggggttacaggcatgcaccaccacacccagctgatttttaatttttttgtagggctggggtattgctatgttgcccaggctggtctctaagtcctgggctcaagcaatcctcatgcctcagcctcccaaagtgctgggattaaaagcataagacatagtgcccagcccttaaattttcttaacgctataagtgaaattcttttttaaaaatataattaaaaaaaaatagagatggtgtctcgctgagttgcccaggttggtcttgagctcctgggctaaagtgatcctcctgtcttggccttccaaagtgctgggattacaggtatgagccgctgtgcccagccagtgaaattcttttttcatttttttttgagatacccaggctggagtgcagtggcgcaatctcagctcactgcaacctctgcctcccgagttcaagtgattctcctgcctcagcctcctgagtagctgggattacaggcatgagccactatgcctggctaatttttttttgtatttttagtagaagatggggtttcaccatgttggccaggttggtcttgaactcctgacctcaggtgatctgcctgccttggcctcccaaagtgctgggattgcaggcgtaagccactgtgcctggctagccagtggaattctttagcgtcctttattcaactcttccttaacatgtgccttgggcatttcatcatgccccatgggattctgggctcaacataccaacgtaattgaacctaattatccctcagattccacttctagatagaaattcaaaagcaaggccgggcatgggggctcacgcctgtcatcccagcactttgggaggccgaggtaagtggatcacttaaggtcaggagtttgagaccagcctggccaacatggtgaaacccggtctctactaaaaatacaaaaaatagctgggcatggttgcgcatgcctgtagtcccaggtacttgggaggctgagacaggagaactgcttgaacccaggaggtggaggttgcagcgagctgatattgtgccactgcactccagcctgggtgacagagcgagaccctgtctcaaaaaaaaaaaaaaagaaaaagaaaagaaattcaaaggcaaaaatagtccaaattcagacactcaatgtcatccacctatattattaaatacagtatcacctcatctaaacaactgaacctggtactaataattaaatcagtctcctctacccaatatgcccacaattagatgaaaagctagccaagaatagccacttacatagcccctcctgtgatgtatcaaagggattactgtgttttgtcatgaacacaatctgagaacatctttttaaatcacagttttgacaaaacttggtgataatatgaagatgttcattaatattggtgagtttgtgaattttactcatgattttgtgaacctggagatgtttcttcccaagagccaatcaacccctgaccctcatcctgatcaatgatagaagccaagctgtctgaaacacagactcctggcctaattgttcttgtttttttgagacagggtcttgctctatcacccaggctggagtgctctggtgtgaacatggctcactgtagccttgacctacacaggtgggtgccaccatgcccagctaatttttttggtagaaataggggtctcacttttttgcccaggctggtcttgaattcctgggcttaagtgatcctcctgcctcagcctcccaaagtgctgggattacaggcgtgtgccactgtgcctggcctaaatgttttaggagttagtgacagacaagagagaaaactggattgtgttcacgatcaaaactctcataattattatgaaatactgatttacatataacacttacttttaatccctaaatttatggaagaatgattttggcttgccacaaatctttctaataatcaccaatactgtatatgaaaattctactatctatgcttaaagtaataaaaaacttggtgataatatgaatatgagtgatcatttaaaacttagtaaatcaggtaacttcagcactctctgaaatgtgtatggaaaataatatctttctacctcttccatttcacatatgagacatggtttttttttttttttttttttttgagaccgagtcttgctctcctgcccaggctggagtgcagtggcgtgatctccactcactacaaactccgcctcccgggttcataccattctcctgcctcagcctcctgagtagctgggactacaggcacatgccaccacgcctggctaatttttttttatttttagtagagacagggtttcaccgtgttagccaggacggtctcgatctcctgacctcatgatctgcctgccttggccttccaaagtgctgggattataggcgtaagccaccgcacctggccgagacaaggtcttttctgaaacatggctactttctggaaacttgcattattgtggtattcggaatacattgggttactttcacaacatgtaagactattaagtttgttctgtcttcctaataccttttacactaccaccctgaggaactaaaaactcttttgcagtaattcttttaaaaatattttttaaagtaaggtagtgtaatgcctccagctttattcttttggtcaagatggcttttgctattcagagtcttttgtggttccatatgatttttaggattatttttctatttctgtgaataatgccactggcattttgatagggattgaattgagtctgtagagggctttgggtagtatggacattttaacaatattaattcttccaattaatgaacatagactatctttccacttattactgttctcttcaatttcttccatcaatatttatagttttcatcgtagagatatttcacctccttggttaaatttattcctgggcattttattttttatagctattataaatggggttgccttcttaatttctttctttttttttttttttttgagacaagtcttgccctgtcgcccagactggggtgcagtgtcaagatcacggctcactgcagccttgacctcctgggctcaagtgatccttccgccttagcctcccaagtagctgggactacaggtgtcagccagcatgcctggttaactcaaaaaaatttttttttttgtagagacagggtctccctatgttgcccaggctgaacttgaactcctgggctcaagtgatcttccatccttggtctcccaaagtgctgggattataggcacctggccttttaatttcttttttagatagtttgctgtcgctacagagaactactactcggccaggcgcggtggctcacgcctataattccagcactttgggaggctgaggtgggaggatagcttgagcccaggaatttgagaccagcctgggcaacatggcaaaacctgcctctaccaaaaaaaaaaaaaagttagtcagacagacatggtggcacatgtctgtagtctcagttactcaggaagctgaggtgggagctgatgctgggggaggttgcagtgagcccagattgcgccactgtattccagtgtgggtgatggcgcaagaccctgtctcaaaaaacaacaacaacaacaacaacaaagaactgctactgattttttttcttttggagatggagtcttgctctgttgcccaggctgtagtgcagtggcacaatcttggctcactacaacctctgcctcttgggttcaagcaatgatcctgcctcagcctcccgagtaactgggactagaggcgcacgccaccacacccggctaattttttgtatttttagtagagatggggtttcaccgtgttgcccaggctggtcttgaactcttgagctcaggcaatccacccgccttggcctcccaaagtgctgggattacaggcgtgagccaccatgcccagcctcctactgattttttatttcgtatcctataactttactgattcattaattagttctaactggtttttggtggagtctgtagggttttctatatataagatcacgtcatctgcaaacagggatggtttgactttcttctttccaattcgaatgctctttctttctttctcttgcctaattgctctggctaggacttctattattatgttgaatagaagtagtgaaagtgggcatccttgccttgttccagattttagaggaaaagcttccaactttttcctgttcagtatgatgttagctgcaggtttgttatacatggcttttattatattgatgtatattcattctatgcctaatttatgtaggatttttatcatgaagggatgttacatttcattatatggtttttctgtatctattgagatgatcagagggtttatgtccttcattctgttaatgtgatgtatcacatttattgatttacttatgttgaactatccttgcatccctgggatgaacaccactcgatcatggccgtcagggaaatagatatcaaaaccacaggaagatatcccctcatccccattagaatggctattatcaaaaagacaacaagtaacaaatgccggtaaggatgtggagaatggaaactcttatacaccactggtggtcatgtaaattagtatagccattatggacaaaaatatgaatgttcctcaaaaaattaaaaatagaactaccaggctgggcgcagtggctcatgcctataatcctagcactttgggaggctgaggcgagcggatcacctgaggtcgggggtttgagaccagcctggccaacatggcgaaaccctgtctctactaaaaatacaaaaattagccaggtgtgatggtgcgtgcctgtaatctcagctactcaggaggctgaggtaggagaatcacttgaacctgggaggcagaggttgcagtgaggtgggatggcaccactgccctccagcctgggcaacagagtgagactctgtcgcaattaaaaaaaaaaaaaaagaactatcatttaatccaacaatccctctcctgggtatacatacatccaaaggaaatgaaagcaatatgtcaaagtgatatctgtacctccatgtttactgcagcactattcacaacagcaaagatatggaatcaacctaagcgtccatcaacaaatgaatgggtaaagaaaatgtggtatatatacacaacagaatactattcagccataaaaagagtaaaatcctgtcatttgtgaaaatgtggatgaatcttgagaacgctgtgttaagtgaaataagctaagcacagaatgacaaatattacatgatctcactcaaatatggaatctaagacagttgattgcatagacgtagagagtccaataatggttattagaggctggggagattaaaggggtgggagctggggacagaggttggtcaacaggtacaaagttacaggtagatggaaggaataggttctggtgttctattgtacagcaaggtgactatagttaacaacgtattgcatatttcaaaatagctagaagagaggattttaaatgacacaacaaaatggcaagtattttactgatagatatgctaattaccctgatttgatcattacataatttatacatgaatcaaaacatcacagggtaccccataaatatgtacaattatgtgccaattaaaaacaaaataaaacttaaaaaatagttaaactactatatgaaccaccattttcacataaaatttaaaggaaagtactgtaatttgaggagtttcatttgagtaattttgttcattaagtctcactgaaaataacgtcatttaaaagtgggtttattgcagataaaaatacactaactactttaatgattaaacattttttcttaccttttcttgaaatacaaatgttatttcttcatctgtggaactctgttggaaatataagcctttcatagtcacctaaaaataaatatatataaatgaaataaaataacaagtcttccagactaaatgtaagcaaaaatggaaaaacagtgctggcaaaggataaaacgacaactacaaatgtagttttcaaataagtaaatttaaaaaatctttcacaaagtgatcaaataagagaatatgcaacactctctgggcacctgtcttactgagaatgggtttacagttcaaccttttactacaaaggcaaacatgcttcattttactttcctatacaataaaaaagattacttaaaagaagccttatgatggccagagaaactcaattttatttaccttttattaaattttcctttaattaccgtttatgaaaggctttcgaagtcttaaagatcattaaaaaggagaaagtgaacagccaagacaccggttgaaaattgtggccctaattcttctgtatcagtctataaaccatttaatggaagtatttaaacttatagccgggcacagtggctcacgcctgtaatcccagcactttgggaggccaaggcaggcagatcatctgaggtcaggagttcgagatcagcctgaccgacatggagaaaccccatctctactaaaaaaaaaaaaaaaaaaaaaattagccaggtgtggcggtgcgtgcctgtaatcctagctactcaagaggctgagacaggagaaccgcttaaacctgggaagcataggttgcggtgagccgagatcgcgccattgcacttcagcctggggaacaagagcgaaactctgtctcaaaaaaataataaaataaaataaataaacttatattctgtgaacttatttatttatttttttttagatggagtctcgccctattgcccaggctggagtgtagtggcacgatcttggctcactgcaacctccgtttcccaggttcaagcgatccgcctgcctcagcccccctagtagctgggattacaggcacgcgccaccatgcccggctaaattttgtatttttagtacagatggggattcaccacgttggccaggctggtctcgaactcctgatctcaggtgatccacccgcctcggcctcccaaagtgctgggattacaggcatgagtcaccgcgcccggctctgtgaacttcttgaggtatctctaaagattccacaattgtttctttaattttcagagtaattatgtggtaagactattttttatgcaaattttacagaagtataaaatatagaaaagtacacaaatccttgaagcgcataacttgttgaattttacagtgtgaatatgcccacatcatggcaggagacacatcatcatacacctccagaagttccctgtgtccccttctcctcctaaggagacccaatatcctaaattttaacagcacagattagttttgtctgcttttgaactttatataaataaaattatactctttaatgtctgttttctttctttctatattaggtttgtgagtctcactcatgttgttacttgtagttgtattccattcattcgtattgctacatagtactccactgtataaacaaattgctatttatccattccactatagacagacacttgaattgtttccagtttggggctcttatgaattgttctgttaaaaacattcttgtatatactttttggtaagaatactattatttcatttattctatgaatgaggaaagtgagtcttagcttaaagcatgtagctggtgtctcatagcaccagctgggccagaactgggatataaactaggtgctacttcttccaaagtcattactcctaaccatggcttttaatggtttcctactgagctgctaacattagatatatcaattaaagttgaatactttttttttttcttttttttgcaacagagtcttgctctgtcgccaggctggagggcgcagtctcggctcactgcaacctccatctcccaggttcaagcgattctcctgcctcagccacccgagtagttgggactataggcacgtgccaccacacttggctagtttttgtatttttagtagagagggggtttcaccatgttggccaagatggtcttgatctcctcaccttgtgatccgtctgcctcggcctcccgaaatgctgggattacaggcatgagccaccgcacccggcctaaagtggaatacctttaagataataattaagtacctattgatagttctggctacataatttgcagagcctagtgcaaaatggaaatgtgggaagccttgtctagaaattattagaatttcaagatagcagagcatgaaatcaagcaaaagtctcttctgaatctgaggtcagtgagactgcataggccatatgtccataaagccagccctctgtgttgaatgttagtggatctacttggatccaaatacgtaaagagtttttacagagtgtagttgagcaatggttgttggtttctcggacgtgataatcaaacgctggaattaacagaaatgaatacacattcaagacatatatagaaattacgtatgtagcatgtatcaatgaagtatataaaagcaggattaagctaggttaaatgattaattctaacgctttggttgcagaaggtctttgtgtcaatgtttttgtttgggggctggggagaaccgaagcatggatacaacatttacgtattccctccagcattaaatctaacctcctttgaaggctctctaaaatgcatactctctctccctactctaccttactgcttccacaatgtccaagcacataccctctatctagttagtatgactttacatcatatggttaccccatctcagagcttctaggcatggcctgttctctgacagaatgctgtaatttagattctgctaagtaaataaagttcaagttctaccccctctctggaatcatccccagtgacactcactccatttgttccatgcttcccgatttcattacacactaatgaaaccttgctttatttatttactaactagcgggctttcccaaccattgcctgggaaatatatccattattattaaataaaaaaaaaaacaactctgttcctactcagtctggagttactagaattgcctttttgagaagtggaacaattacgtatcaatgccttgatttcaaagcatcttgctttgtgatactggaagctactgttttctctgcccattgaatcttgaaatatatggcatgtctcccagataagcagtcacatggaccttagactgtgccccaatttcaaagaccctggaagataactgcttgtttgtacccctagtatcccttaaaacaaacaacaacaacaatatatatatatatatatatatataaaataatggcaatatttttagtcacatcatcctaaatagtttctctaaattaggtgaaaattgccctggttggtggaaaaaagtaatgttcagttggtccaattgagaattgtatgggaacaaaaatatccttaaagttacaaagtaaagaaagagaggtgtttttacaaaagtagccagaagaaaactgaggaaatatttgtcttgaaagcccaaaaaaagaatactgagttcctagtactaggaaaatggtagaatggatggtattcaaggcccacatggtttcctaggcagattaaataaaacagtctattacgtaacaaaattgtatttcattttattttttgttttttgtctcacactctgccaagtctcatgttatttaataaaatttgtattgacttaaaatacatttgcacataggacataaaagtattaaacttttttttttttttttttttttgagacggagtctcgctctgtcgcccaggctggagtgcagtggcgccatctcagctcactgcaagctccgcctcctgggttcacgccattctcctgcctccgcctccggagtagctgggactacaggcgcccaccaccacacctggctaaattttttttgtattttttagtacagacggggtttcaccgtgttagctaggatggtcttgatctcctgaccttgtgatccgcctgcctcggcctcccaaagtgctgggattataggcgtgagccaccgcgcccggccataaaagtattaaacattttataaaataaaaatataaattaaaatgtataggccgggcatggtgctcacgcctgtaaccagaactttgggagaccgaggcgggtggatcatgaggtcaatagatacagaccatcctggccaagatggtgaaatcctgtctctactaaaaatacaaaaattagctgggcgtggtggcgtatgcctgtagtcccagctactcgggaggctgaggcaggagaatcgcttgaatctgggaggcagaggttgcagtgagctgagatcgcgccactgcactccagcctggcaacacagcgaggctttgtctcaaaaataaataaatgaacaaataaataaaacaaaatatataatatgacatttctaagaaaagtcatgtaacttcaaaattataagttctactataaattttactataccaaaaaagtatgatataaaactttttgcccagagtggtggctcacacctgtcatcccaacaatttgggaggaggctggggtaggaggactgcttcagcccaggagttccacagcctgggcaacaaagcaagaccctgtctcttaaaatacaataaataaataaataagcctggcgtagtggtgctcacctgtagttctatctaggcattggaggctgctttgagctataatcaacactgcactccagcctggacaacagagtgaaaccctgtctcttaaacatacaaaactttttaattacaataaacctgtttaaaaatgtaggctgatatagcctgtgaaaagcatagaaattttatacttttacaggtatatcagaatttcaaaatgtttgaattaatccacaaactgaggattatgttagtaatactataaatttttatattggccatacagtaaacttactaaaaaatctggagaaacaaaaattaaggagataataccaatttagaataatttttagcaaaagcagaacgagaactttgcataaattaaacacttgactacaaacacttcaagaaagtagttaataaaaatactgatctgttaagggatttctaaaaaatcaatgggaagtagtttcaaatggtttcatccttcttataatagcaacatgaactccacttgctcctctgttacactcaatcccccaagaagctcatctattcttttttctttttagacagtttcactctgtcgcccaggctagagtgcagtggcgcgatgtcggctcactgcaagctccgcctccggggttcacgccattctcctgtttcagcttcccgagtagctgggactacaggcgcccgccactgcgcccggctaattttttgtataaaactcatctattcttagttgtaaataaaacctctacaaatcattccttacctacactttcaggccaaaagtgttttgagcatcagaccaacttcaaatttaacagacacaaagctggactcatctttcccccaaacaagattttgctgtactctctagtcatcaagaataatttagatcgctgggcgcggtggctcacgcctgtaatcccagcatttttggaggccgaggcgggcggatcacgaggtcaggagatggcgactatcctggctaacacggtgaaaccccgtctctactaaaaatacaaaaaattagccgggcgtggtggcgggtgcctgtagtcccagctacttgggaggctgagaagggagaatggcatgaatccggaaggcggagcttgcagtgagccgagatcgcgccactgcactccagcctgggcgacagagcgagactctgtctcaaaaaaaaaaaaaaaaagagtaccttagatccatcccatcaccttcacctcaatgcctggggctcgggctgtggcgataggctgccaaatgctttcaatactctccctcattcaactcatctattcccctatggttaatttaattcctgaaagtccaaactcctcttcttacatgctcaaatttttattagtccccaacacaaactttataatactatggccactccaggttcagagttcggttataatgtttctaacctaccttcatttttaaggaaagcaaagatatatataaacagctacacaagagaaaaacatatatatatatatatatatatatatatacacacacacacacatataaacagctagacaagagaaaaacagatgaagtcaactctgaaatgtggccctgtatgctcaacctggtcaccatgccaggctctcttgggcagtatccaataccctattacccatccatcgttgggacctgtgcatagcattataatactagctggattgttagggggaaatcttcagttatattttgatcatttgggaaaaggtgaattaatgttaaattttaacaatgttcacattaatctgtgagactttttgtacatattcacacattggaaaaagaaatatgcccaaatatttgattaaaaagaatatagtcaccataatcaaagcaactagctggaggtttggctcaaatatattctgcagggtgtggaggatggtagtcctaatgggtcaggtctgcttttttttttttttttttttgatacggagttttgctctgtcacccaggctggagtgcagctgcataatcttggctcactgcaacctccgcctcccggcttcaagtgattctcctgccccagcctcccgagtagctgggattacaggcgcacgctaccacacccagctaatttttttgtatctttagtagagatggggtttcaccatgttggccaggctggtctcgaactcctgacctcctgatccacccacctcggcttcccaaagtgctgggattacaggcgtgagccactgcacttggcctgcttcttaaagagggtagtgaatgcatggttataacagttgaggatatctctacatggtatagtcaacagtctctagaaatatgtatattcaaaggacactttgcactagcaatgagtccacaggtgttttgggtgttttgctgtgcacaactgcagtgctcttttgtgcctgttattatataagatgggcacaggagatattgtgacagtggcttatatctggctaaaccttgtaaagcaattccagctgataatataagaactttaggcattataacttaaaactaaatggaaaatgcgtaacattagatggtccctatcactagagggactgaaacagaggatgggtacatattacacaggcttcataaagcagattccagagtcaactgagtgggacaggtggatcaaatgaccatttagttctcttctaattgtgacaatcttgataaatattatcaaggcatattcgattgaatttatacatgtgtggcataatctctacatcttatgcaacttgagatctaaagatagataaaggagcagaaaaggaaaattgtttcttttttgcctacagtggctctcaacaaagaactcttttggatctcaaaagaatttttgatgacctccccacctccatgagggatttattttattatctgttgattttcaggtggcattttgacttaagagtctagggtttcttacatgaccaattccccacccatatctctgggggttggagacgtgggatggtcattatcccaaagatctgaaaatctctgatccagttactattcaatgtagggctatttaatataatatgatccagaacaacagaaacttaactttcatttatatttttgaatgagcatcttattttcctatattgtactactggggaacaagggagcgaacggtgtgatgaatgagtcttccctttataaggtggcttaattatgtgactctgggacaatgcaggtggaggcctctggtgatgagaataactaattgagggatcctcccgaaactctaccacacaacagttactcgctcccctccaatccatttaactgactttcttttccacctactaacattattgaagtttgtaaatgcttaattttccagttcactagaggattgtagagaaaccacttcttgcttcaaatgaaaaatatgaattgtaattttgattaaatatttactaattcaaaaatcaagagaaaataatttcatgtctttattatgcataaaatggaagacttttttttttgtaaaataccatattttagcatatatagatgtgtatttttttttttttttttgagacagggtctcactctgttgcccaggctagagtgtggtggtcgtgatcttggctcactgtaacctccgcctcccgggttcaagcaattctcctgcctcagcctcctgagtagctggaattacaggcgtgcaccaccatgcccggctaatttctgtatttttagtagacacggggtttcaccatgttggccaggctggtctcgaactcctggcctcaagtgatccacccgcctaggcctcccaaagtgctgggattacaggcgtgagccaccacgctcggccaatatgtgtatttttgctcttctgctcataaaactctcctgagctcaatgtagttcattgggtctacaaaaagagcatagttaatcttagaaatatttcattgcacaaggctggcagctttatcttgtatggcgaactacctcactttcaaatctaaacgtcttatcccctgctgtaagctggaacagaggcatcgataagggaaattagtgataaaaggtagtaattatacactgcaatggctgcgggatctgatttagaagtcataactgacccgagtttgaatcggggctttcctacttattagcggtatgactttgggctacttaattttaacctttctgggcctgagatcccatatcttagataataatagcagttatctcagagggttgccataaggattaaataatacctgcaaagcactcagcgcaacatcatactttcagaaatgttggctattttgactattatttctgtaaattgggcacatctcaattacagagaatctctaaagtagttctgaatcccatctcatagagttgcaaagggtttggtcaatgcaaccttatttttcccaccttttaatttctgcagtaggctactgtagcagccactagcacaggtggctattgagcactccaactgtgtctagtcggaattgagatgcgctgttaagtggaaaatacacatcagattttgaagatttaattttgaagaattaattttttaatttaattttgaagatttaatacgaagaaaagaacgtaaaatctcaatttttaaatatttgtttaagcgttgaaatgataatgtctcagatatactaggctaaatgaaacatataattaaaattaatttcacgtgtttcttttcactttttaaatgtagctaccccaaaattaaaatgacataagggactcgcattatatttgtactggacagagttcaggtaaaacctttctactcataacgtggacagcagcacctgggagcttcttagaaacgcagatgttcggccccgacccagacctatcccaaggcgatgcttacatctcgctccagatgattccgccgtttagcataatgaagagggccgatctggctcaaaagccacatacagcgaataactactaactgctttccgaaaacagcaaagtgatgaggaagaaagaagtggctgagaagaagtaacagagaaagaaaaagacactcaaattctaggaacaagaagcagaggagaaaaacccaacctgggagattaagtggaagggcactcccagacctctgcctccataaaagtagagggagatgcaaactgagataagacctacaatcaaaacccgtcaaggtccaggaaactgtccctcaaatctagtcttacccacccctcagcggcctcagctaagctaggcctgggcccgaacaagtcccaggttagggttcgacgcgaaccaccatcctccccagggctgcacggttctgtggggcatctctccacctttcgcttaaaggcccgtttcccaagacacaggacgcgtttcccggggctcacctgcctctgagccgccccaacggcctgcaccttcaccaccgccaccttccagtccttcgtcagagagcccgccccctgctcccattggtcaggccgctcgtcactcctgaagggcggggtcggactcgcgaggctgtccagaacgccatggcaaccggtctcggaactacatctcccgtcatgttccgctcgggggcggagaaagaggcgaggccccgccccaaggactaccaataaatgggcgaagttggaatcgcccggatgggttccgttttatgcaaattttagccgaagaccacacccttcctcattccaaccataggcccggccaacccctttgggttgtgcttcgcctttttcctttccacattattctctccttgaaaacctccaataattaagtcaattaagtgcatcctatctagtgtctctcacggcaacgagcagatgcaccgaaatcgtgcaacaaaatctccataaaccacgataggcaacctcagaccataaatctcctgttacgcctacatggggaggagggggagagtgctaatcctgcccccacacagcccctgctgattggctcattcggcttgtcactctgttgtcttacatttctttggctcaccctctttgggttcgcacggtgggcggggccagtggtagggggtggtgagaaggtgcgggccccttcttccaattggctggcggtttccccacccacttatgggcggagatggatggtggatggggggcgggggaggcagcggagggagatgaggagataggcgggagcgagggagcgagggagggagcgaaggaggtagagaagagtggaggcgccaggggagggagcgtagcttggttgctccgtagtacggcggctcgcgaggaagaatcccgagcgggctccgggacggacagagaggcgggcggggatggtgtgcggggctgcggctcctgcgtccctcccagcggcgcgtgagcggcactgatttgtccctggggcggcagcgcggacccgcccggagatgaggtgaggagagggctgcaaggcggcggcctggaccacgggcggctgcagcgggggcgggggtcggcgcgggggtctgcgcgatggctgcccggggcatccgtcccgcgcccggcgcttgtctccccggccgcccttagcccctcgccgcgcgcccgagagacggcagcggctgcccctctgccttgtccttcccgtcctcgggggtggcggcggagtggcgggcggacccgcactgggaggccgggggccgcggtgggccgtggggtggcggccgcgggacgggcgtggggatgaatgggcgccgcggccccgccgccgagcgggctccctcctctcgcggggaccccgggcggccgctccttcccgggctgacctcgctgccctcggccgccggcgaggggcggcccggcctcgcctcccgccggcctcccggggacccgcgttggcgggagcggcgccgcctctgcctggagccccggctccttcctcggcccctcgctcgcaagcctgcagaatcctgggtcagtgaagggcaggcaatgccgttcggccccagggcgcgccgcggggccgcccctgaaggcatttaaaggggagcgtcttccgcgccctgtgagcgcgtccccgggtccgccgcgtcccttcccttcttacgcaccgacacggttttgtggtgtggacccaagacacaattgcagtcccttgcttgcacgaatgcaatccgaattcccaaaaaaaggaaaccggcgaggaatcggccgcaccttcctgcgcttctgcttgccttgggattagaaaacaacttcggagattacatttcctatgggcaatcttttgttgtgattcagactcaagaaggctttgctttggaagaaatagattagcggcttctctgtggagttggaggctatagagatttttatagcctcttcaatatgaaagtttcctctagaactttgccatcatcagtgctattctgagggcagcagcaacctggaaatttagatacatgcaggctccggccagatgcgtttctttgtgcttgtctgttggcattcttctcttgctgctcctcttgatcaaaacgtacagataataaaggcaaggccaatgaagagggtagataataacagcaaatcccatacaaacaaatgcctctagaaattctcagttctgtcagcggggaggcagttttgctaatcccgtggaacggatgaaaagaaaggcacagagatctcatggattatgtagtggacaggatgtgagggcaggaactggggccaggacccagcaggccagctggtttgcatggtgccactctaaacccccaaaatatgaataggaggaatgtatttgttgggatacctttatttttagatgactttaaggttgagagtgcagaagcttaaacatccttcatagttattatttcttagtttatctctgagaacaaaatatgtttctgtttaaaatttcttttactggtgtgcttgaaacgttattttgatgggagtttccttgtaagtaaaaacattgaaaaatacatacatatgaaagaaaaatccttagtgcagatgggtttgtaaagaatccagggacttttaagtcatataaattaagaagtgagggacactaatttgatgatggtgttaaaattatttcagacacctttaagtagtccagtggagatcatttctgatagtatgatctttttttaaaaaaatggtatttctttatctaggaatgcttctgttgaaattgctacggcgcatggtaccgtcacaaaactcttttattattctgcctgagtaagagaggaaatgaacaaatttttaatgtactttggaaccctgcggattgcacagatactaagcattgtgaaatagggcataaaatgagtggtagcaagttagttctgtgaaatgtttgtcgctgttagcatttttttttttttttggcagtcgactagcaattttcttttccctaaagcttatcttcaatattggtagtagaacctctgctcaagtttatcttttccccaagtgcctagactgggacaaactatcaagcctcctgtaagagattaaggaggagctgctggtaaattcctttcctttttttttttcttgaggcagggtctggctatgtcacaggctggagtgcagtggcgcaatcttggcatactgcagcctcgacctcctgggctccagtgatcttcccaccccagcttccagagtatctgggatcacagatgcacgccaccatgcccagctaattttaaaattttttctagagacagggtctctctgtgttgctcaggctggtctaaaacgcctaccttaaacgattctcccacctaggcagcctcccaaagagctaggattagaggaatgagccaccatgcttcgtccaaattcctctactctaaattatctttttaatttgctaacatttgtgagttgtagagaattgatgacacgagagttgggattatattatgcacctcaaattcttctgccatagagctgttcccttctgaatgatcacttcctcctgaatggctccacttaactggttgggtttcttaaagtgtgggcctcagatcacttacatcagcattaatggaggcacttgttaaaaatataggttttgggcatggtggatcaaacttgtaatcccaacactttgggaggctgaagtaggaatagcttgggcccaggaatttgagaccagcttgggcaacacagggaaacctggtctctaaaaaaaaattttttttaatattctgggcttagtgactcgtgcctatattcccagcttttctagaggctgaggtgggaggatctggttcgcttgagcccaggagatggaggctgcagtgagccatgattgccctactgcattctagcctgggcgacagagagagcgagcctgtgtccaaaaagtaagtaagtaaataaatacataaaaataaatacgggtttctgtcacctcgcttcagaatcagacagctagaggtggggccctggaattggtgttgttaatgcattctccaggaatttctcctgcatagggaagttggaaaccactggcttccttctctctgagcatctcctgagactagctcctgaagtggatagaaagtttttcaagtagcagattaagttttatcccttaggctgctaataaaaaacaattgactgtgattgcgtaattttacctgtcgtacacctttcagaaggcagaggctttggttcacccctctacctccagggcctaaaacagtgcctggaggaactcaattaaacatttgttgagtgaatacgtgaattacattgcagcgaggccaatcttttaaaagttacttgtcaaattaatctatcagttagtggcatattaaagcccagcatattacaaaaaaattttttttagtagtcactgattttataaattaggagccacaagcactataccccagtgacttctgtaagtttggttagtttagaaaggagagagcctttcccaggcgtagtgtgctcaaggtgattagccagaaagaagattcagaacaaagcatttgcttagagagtcaaaatgtaaatttaagtcacagtgtagtggtaaatcatatatcaaacttatatttggtatattgtcttatatcaaaatatcattttataaaccataagtccaacatactgctataaaaattggtttctagcaaatagagaaaattgttatgttttccaatttcacttttcatactaataaaatttgacctttacaccttcttttcaagagttcaccacagggcaccatagatattatgtagttaagagctcaaactttggagaatattgtgtttgaccacacatagtcagggagtttgatctaacctctcaatgcctcatttctcagctgaacatggaaatagtaataataaagttcacatacttctaagtgcttacctaagtttttgagacacatccacttaataaatggtagttacagtgatgataaagaattggggtgtataaaaatacctaaaactcaaaagctaacccatttaattattgtactactggacttttatgatagtaagtagaaatctgttgcttaaaaaagaagtttctttggtggtgtgcgtctatagtcccagctacttcggaggctgaggtgggagaatcacttgaacccaggagatcaaggctgcagtgagctatgattgtgccactgcactctagcctgggtgacagagcaaggccctgtctcaaaaaaaaaagaaaaaaaaaagtttattgctaactccttggtactatgtataatttttttaattgaatgactagactaaacattgaaagtatttaataagctatcaaatatgtattaatataagttttgaaaataaatactaaatctcctgatctcttttaggttaaaatatagtttatgatgagcaactaatattctttgtatttaaaaagataattgttttatggtagaaaaattgaaatacagaaaagtataaagtagaaaactatgaaatacccgtaagtctactacctgcatacatatttcttcaaatccttttgtgtgtgtgcatatggctattcatatacaatttctggtaacaaaaatgggatcttgctatacatatggttgtaacctgctttttttttgcttaacatcttgtcatgagtgtcttttcctatatatatattgcattataacaattttagtaaccaaataatattccgttttatggatctatggtagttttttttttaatttttattttttcagacggagtctcagtctgttacccaggctggtgtatagtggctcaatcttggctcactgcaacctacgcttcccaggttcaaatgaatctcttgccttagcctcctgattaactgggattacacatgcctgccaccatgcctggctaatgtttgtatttttagtggagatggggtttcgtcatgttggccaggctggtctcatgctcctaacctcaggtgatccacctgcctcagcctcccaaagtgctgggatcacaggcgtgagccaccacacccagtcatggatctctggtggtttagccaatttatttttattagacattagtttgtttatttttcctccacggttacttataaccctgcagtgactgtccttctacatatgtctctgaatgtacttgtgagattattttcattaggataaatttctacaaatggaatttgcaggatcaaagcctatgctaaattttaggattttttaaatccgtatttccaatttgtcatttagaaagattgtatcattttatactcttaccatggtatatcagacttccagtctcccagccccttgtaccttcccccattttatggaatgacttaaccagtgacaaacctagtgaatttttgcttttaggaagaagaatggactgttagtataatgtgtttagtagtgtgatatggaaactcagaaatcttgtgcatgggtaatagtgatagctaatgtcgattaagttcttttgcagcatcttatatacattaactcacttcacaaaaaactctcatcttacagatgccttggaaactagggtaccagcaattagagagccagcaagtgtctgagcagatttttactgtagagtccaaaactcttagcctgtttcctagacatgttttataggcatttgggtactttttatgttctcgattgctgttgtggagtaactaagaggttctctgacatgtactaatatataaactgggtggggcacaaatttgaatccctttcactgaagagttggtcacataagttagctcagaaattagctttgggaccggtgctgtgggtcactcctgtaatcccaatacttgagaggccaaggtgggagcattacttgagcccaggagttccagactggccagggcaacatagcaagaccctacaaaaaattttttaaaaagtagcccagtgaggtgatgcccacctgtagtcctagctactagggaggctgaggtgggaggactgtttgtacccagaagttggaggctgcagatgccacagcactccagactgggcaacatagtgagatcttgtcaaaaaagaaaggggagggcagggcaagagagagagaaaagaaaggagagaaagagaaagagaaggaaggagaaagaaagaggagagagagaaaaattagcctcatcaactgtccagcattcatccttaaagtagtcttgttatcctttactctgtagtggttttcctaaagtacccctgcatgaaaaacaggattagagtgctagagaagactagtgaaatttgaaaaggcagttcacttgtgatgtggacttgtcttagaaacgcaagactgtacagaagtgtgatgagggagacagctgggtgtgtgtgtccaggtagttccatgttggcgagtttggagatagaaagtggcctaaggaagtttacttcctgaatgtgaatgttggccactttggagatagaaagtggcctaaggaagtttgcttcctgaatgtgaaggcctcagtgtagagagatatcatccactgggagatcactgaaaagtaaaccaaaacatttttattaatacatgggatggtagaatgtcactccagttttgttcctaaagttcgtagctctctaagaaagtgaattttaagcaagttaatctattttaatgcatcactgctctttcggtgtttttctagtagaattaatgataggtagcttgctttattagcttactgcccagagagaacattggtgaaattgttttggcttcagctctctggactgagtttggctgcctagctcagttttcagttggtcaccaaaacctgtcattgtttttgtgtggtatggggtctgctggagtcatgtggtagtgcgtttggcccttcattgagtggtggagccaggagttgagctgagggctgtggcagaattttgaattcaagtgaattcgaatgtgaaaataacaatgtctggccgggcgtggtggctcacacctgtaatcccagcactttgagaggccgaggtgtgcggatcatgaggtcaggagtttgagaccagcctggccaacatggtgaaaccccatctctactaaaaaatacaaaaattaggcgggcgtggtggcgcacaagtgtaatcccagctacttgggaggctgaagcaggagaattgcttcaattccctgcttgaacccaggaggtggagatttcagtgagctgacatcgcaccattacactccagccttggcgacagagcgagactctgtctcagaaaaaaaaaaaaaaaagaaagaaagaaaataacaaggtcatagcaacacagcaagtggtcagaattttacccttggtggttaaaattaaacatcctctttttaatacaggaggacaatgctcttgctcctctgttgcactggtgagcatttgatgtgttcctccttgcattatgtctgcaaatcgttctggtgtctggtggcatgcatttgcaagacatggatacagttcatggacgtggacgaggtcagctggcttttagtgtcaggctttaaccaacctagttaagaaggacgctgactcttaccataaaagcactgcaacaagattggaattggagctccaacgaattggagccattcgttttgtgtgtgtgtgtctgtttgcctgtgtgtgtgtacagggttaattacttctctgcaaggcaaatttcctgaccggttttattgttctaacacagacaaaatgttgtgtaaacacatatatcattccagtgtgttatctataataggagtgttcattgtggatccagtgtttcacaaaaatcaattcatttccgctctgaacttaagatagtagattttaaaaccaagttatctttcaatttctgaagttatctgaaactcagctgccccagtcttgcagaattggagaattgcattttggccactgatgaatgaaagctatatagctagtaatgagagaaaccttgaaaaattgacaagaaaatgagtgccattcttggtatatagcagatttcaatgaatagtagttccctttgcctttatttttcctctttcctgcacttaatataaagagctaatattaaagtcattaaatgagaatagatctgtattataggtagcactgcttatttttagaccccttcagatacagttattacaattgttgttttaatattctttaaatgattacaggaggaagaaacttggtagcggggttaccaggatgttagctccatgagggcagggagtgtatcgctgttgtccagggggctagccccaggccctagagcagcgcctgctgcctggcagacacgcaagggttatttgttggtttattaaatcaaggagtgtttgaggtccttcaagcctggaggcccgagggctctgagctggtacagagcaagtgctgggggcaagagagacaggtggggagtgaaggagagaggcccacttgggacttgactctgaatgtctgggaagtaggaagttaatgtaagttttaagcaggggagtcccatgatgtgcttttgtttaaaaatctccttctgagtatcatgtgggagtggattggaggatggatagagaggaacattccattgactcggcttccagctgtctatggatgttgacgtttctacctagccttctgctttatctttgtgatgaggataatgtggtgtactttgtgaggtctcaggaatggtttgagatgaatggtaatttgtgtaaactttccggagtttctctgaggaaaagagaaccccataaaattattactattgatcaaatgaaatagcagtgtaagacaaagatcaagaattatttagctttataaacaaattaattgaggttatgaatataggtttctataggagagattttgtttcctttttttagtgaaagaaatcttaaatgtatgggaatgaatccttaaaatagcaggcttttgcattgtctatagaagctgttctctttgaggaagatctgttttgtaaaatgctgctgttgtctgtccaatctggagttttaattagtatcaaagggagggaaatcctgcagtaatcgtaaccttactttaattcttagttcaattagttttaaaccacagtcattatctgttatctttagttgttttgatcttggtagatgaagtgattaatattacagttgtgatttggtaatttaaaaaataacatgttttttcctactacaaaaggaatacatgtttattgaagaaaacttttggaaacatatataaggaaagaagactaaaagcctaccaagatcttaccatccagtgataatgactgttaataccctgtgaaggtcaacatgctcaaattacccagcaggtgcctggtgtgaagctacttagcccgggagagttgaaggcctgttagggaccacgagcactgaaggtggcaggacggtccagggccagtcaacccagacctttgtggttctgggaggatgcgtcctggtgttactacaccttatagttatttaggagaatgtgggtttaatatgaaatcttctgatttttatgtgggccacactttttattgttaacacactggggttcaaagcatacctgagggctggattcagtcttcgttgccttgccagtttgtagcctcaggtacgtacagttttgtagcctgtgtttttcacttaatgtgttgtatttgcagccttttttgctacatcgtcatatatgtaatcagtcacttattgctggacctatagattctttgtctttttgctttttaataaagataggtaaaattcttggaccaaaagttgtttgtaaagcctttgcagcataccgctctcagatgcattccccctatcatgtaaaaggtacttgtttcctgttctcttaccaggactgggtaaaaccatctccaaaaacatcttagccaattttatttgttttaacttgcattattttctgtattaccaatgagtgtgaatgattattaaatgcctattggccttacacaaatttatttggtaaccaacttgtcttgctggaactctaagttccagcaatgttttggtcttgcattcaatgcttctcagtctttgtgattccagataatattagtactgtgttagtagcaataattagtactaattgtaggcatcgttccccaaaactgagggcatcagtatctttggcacaactataatccacttaaagtactgtgactgggaagttctttttttttttttttttgacagagtcgtgttttgttgcccaggctggagcgcagtggcacagtcttggctcactgcaacctctgcctcccgggttcaagtgattctcctgcctcagcctcctgagtagctgggactgcaggcatgtgccaccatgcccagctaatttttatattttcagtggagacggggtttcgccatgttggccaggctgatctcgaactcctcacttcagatgatctgccctcctcagcctcccaaagtgctgggattacaggcgtgagccaccgcacccagccgtgattgggaagttctgagtttagttagctgttcagtgaatgtttgagtacacgctgtatatgcctggcattgctctaggtgagtagccttgaaccaagatagaatctcagccctctaagacttctatgcttttttaaaaattctcgagtttttcatacagaccatcatgtttataaaggaccattttcattcctagaatttataatttatttttaacttgtatttctttcttttttttcttttttgagacagagtctcgctctgttgcccaggctggagtgcagtggcacgatctcagctcactgcaagctccacctcccgggatcatgccattctcctgcctcagcctcccgagtagctgggactacaggcatcagccaccacgcccagctaattttttgtatttttagtagagacggggtttcaccgtgttagccaagatggcctcgatctcctgacctcgtgatccgcccgtctcggcctcccacagttctggaattacaggcgtgagccactgcgcccggccaatgtctttcttttttttgagatgatgtcttgttatatcgcccaggatggtcttgaactgctgggttccagcagttctcctgtcgcagcctcccaaagtgctgagattataggcatgagccaccataacttgtatttgtttattggcatggaacttctaaaacagtgatgaatgcttgttaccctttaattccttccttctttccttcctctttctctttctttctctctttgtctcttctttctctcttttgtctcactctgtcacccaggctgagtgcagtggcatgaccatgattcactgtatccccaaccttccaggttcaaggaatcctcccacctcagcctcccaagtagctttgactacagccacagccacgcaccaccacacctggctaatttttttttttttttttttggagagacgatctcgctgtgttgcctaggctggtcatgaacttctggactcaagtggacctctcgcctcagcctccccaagtgctgggcttacgggcatgaaccgctgcacctggcctttgattttttaaattcactttaattatcttaagttctgttatactctagactcttagcaagagtctagaatcaacgttagttattagttccgtattttgattatgagacaaggtacaaagctgagactgtgtgatgagaacctttggaatgtatatctgacccaacacagatcccctaagtgcccttcaacctacacatccaatttcttcctacctccttctctacacaaaagacataatacattgaactcgggttgggcacctgaccaacctggcccaatcagtgttcgtttcttccctggaaatttgaaactaggctcaatagagaaggatttggccttaatatgctcaaggaccctaagtaaaggattgggagttataagcagttatgttctgctgtctggggactaagaaagatgatttatggatggggagaataaagtaactgtctaaagagaagcagagagaacactacctgactctctgacagcattaagccactctcttccagtctgttcttggtccagctgcattctcgttcttgagttcttaaggttacctccttccccttgatttaggtagctggagtttctgttactgtgaactaaacattcttctcattcttaccacaatattctttttatgatactaccttgtctctttttttttttcactatgtctagggacgttgtgaatttgttattattttctccatataataacatcaacagttaaggatagcaagaaacatggaagtaccaaaatttaatctaattcaggcaatcacaatttgattggaaaggccattttacaaatgcggactctggctcggacctgttttaaaccggtgtagatctctagctgagggaaaacaggaaggaagaaattttgaagttacttttaaatgttgcagaatttcagtggtgtcatttcctttcacatccatataaaatgttgacctcctgcaaaaaccaatactagggacattcacagtgtacagtattatgtgcatctgtatagggggtgagtctgaattctgttcaagtgtgtagccactgaaacaagattttttttttgtttgaggcagagtcttactctgtcacccaggctggagtgtgcagcggtgcaatcttggctcactgcaatctctacctcctgggttcaaacaatccccccacctcagcccccagagtgggtaggattacaggcaccaccatgcctggctaattttttttttttttttttttggtatttttagtagagatggggtttcgccatgttggctaggctggtcttgaacgcctgacccaaagtgatctgcctgctttgacctcccaaagtgctggaattacaggcgtgagccactgcgaagggccttgaaacaagactctaaagtgtactgtcgaaataccaagaagttgaatcacagaatagtttacctggggctgggcttagttcttagattagctttctgtgtcgtggtgatgtcatgtatcaggaatccttaacttaaaaaaaactcagtgataagtttaagtagtccactatctaaatgcagttgggtggggaggtggaaaaagtgatagggagagaaaaaagaggattgtaggagagagaaggaagaaaaaggaaggttgctttattgccacagttttctttattcataattgtatttgtatgagctttttcatttccaagtggaagaagcacagcattgaaatgtagtgactcacatacctgtcaagtccaaggattctgattggcctggcatgatcgtgtgtctgaacccatcatatgaccaagggaaacgtgtactctcattggctctcctgggccttgggtctaccttttcccccagttggtgagaccagtacctaaactcgtggaattaacagaaagcattaaagagaagtaggatctgtcaagaggagaaaaaaacgctaggcaggcaaaacagatggcctttactcagtgtatgatcagtgtcatacaaattaataattaataattgaagttacttttaaatgttgtagtatttcagtggtgtcatttcctttcacatacatataaaatgttgacctcatgcaaaaaccaatactacagacattcacagtgtacagtgttgtgtgcatctgtatagggggtgagtttgaattctgttcaagtgtgtagccactgaaacaagctttttttttgagacggagtctcactctgtcacccaggctggagagtgcagtggtgcaatcttggctcactgcaacctctacctccagggttcaaacggtccccccacctcagcccccggagtaggtagatcaggtctgtggcgtgccacttgttttatttatttatttatttgtttatttatttatttggcagagtctcactctatcgcccaggctggagcgcaatcgtgcgatctcggctcactgcaacctccgcctaccaggttcaagcaattctcctgcctcagcttcccaagtagatgggattacaggcgcctgccaccacgcctggctaattttttgcatttttagcatttttagtagagacggggttttaccatgttggccaggctggtcacgaactcctgacctcaggtgatccacctgcctcagcctcccaaagtgctgggattacaggcgtgagccaccatgtccggccttttttaatttttttattttaatttttagattcagagggtacatgcacaggtttgctatgtaggtttattgcatgatgctgaggtttgggcttctaatgaaccagttgcccaagtagtgaacatagcaccagataggtaggttttcaacccctgcccccgttttggaatccccagtgtttattgttcttaattttgtgtcagtgtgtacccagtgtttagttcctacttgtaagtgagaacatgcggtatttggttttctgcagaagctttcttgaccttctccttttatctctgattgtcagtttcctcttagtttcatttctttccataagcagctgtgacctcagcatgggtcatttcagctatttccttgccctgttgctctgttacatttaggacttcccaattccctttgagggcttcttatccttaaaatgttgctgtcgccagggcttttcataccctcttttgacatttcactggtcttccacggcagtcattttcactgtatttatctgtctgtacctggagcggtgtctttttttctaaccctgcatcgtgtaatgatgatgttctgataggtgattttgtctttgtgcaaacatcataaagtgtatggttgacctttgaacaagggagggattaggggtgttggtccccaacacaggcaaatccacatataagcagggctccgtggcccttgcctgtaatcccagcactttgggaggccaaagtgagaaggttgctcgagaccaggagtttgagaccatccaagcaacaaagtgagactcccatctctacaaaaattttaaaaatcagctgggcatggtggtgtactcttgtagtcccagctactagggaggctgaggcaggaggattgcttgagcccaggaatttgaggttacagtgacctgtggttgtgccagtgcactccagcctgagcgacagagccagattctgtttttaaaaaaaatcatataacctttttgactcccccaaaacgtaactactaatgacctattgttgaccagaagccttactgataacatagtccatgaacgcatactttgtatgctatatgtatgatatattctattcttacaataaactagagaaaggaaaatagtattaagaaaattataaggaagataaaatatatttactattcattaagtggaagtgggtcatcataacattcttcatcctcattgtcttcacgttgagtaggctgaggaggaggaagaagggttggtcttactgtctcaggggtgacaaaggtagaagaaaatctgaatatgagtggacccacacagttaaaactcatgttattcaagggtcaactacttatacaaaccgaggtggtatagcctactatacacctaggttatatgtatagcctattttgctccttggttacaaacccctacagcctgttactatactgaatactgtaggcagctgtaacacaagtatttacagtggtatttgtgtatcgagacatatctaaacatagaaaaggcacggtaaaaatatgctgttacaatcttacgggaccacgattgtatgtgcagttcatcattgactcaaatgttactggctgcatgactgtacctactggatccattgggcgcttaaaacttcaatacatctagagcattgctcacctgccacctttcttctgaccaacctcttcctctgtctgtatatcccatcttggtgaatgatactattatctatccttttgttcattgtttcagcagttatttattgattacttactgtgtgtcagatagtctgtggtataattttatatcattttgttcctgattcctagcacatagcttccaaaatctttggaatttcctgagtggtgggagtgtcttcttattcataatgagtccttttggatcttatctgagttcatgctaatgaactggctcctggggatgaggggctggacaccctcagaattgggggtggtccggaggaagcagtcaggaaactgcaggattggagggttggaactttcagccctccgccaccaccagctccagggaagagagagggactggaaattgagttcagtcacgtggtcagtgatctacttaatcatgcctatgcaatgaaattgcaaacgaaagccctggaactgtgaggttcggagagctgggttggtgaacccatgatgtgcagaaaggtgagtgcctatattgcacagaggaggagagggcatggaagctctgtacttcctctcccccatgctttgtgcagtgagtctcttccatttggctgttcctgagttgcacagagcttttccatgttcggtgagttgttctagtcaattacttaacttgaagtggagttaggggaacccctaaatttgtagtcagcctggcagaagtgcaagacttgaggctggcatctgaagtggggaagtcttatgggaccaagcccttgatttggggagtctgcactaactccggtagtgtcagaattgaaatgaatggtaggacacccagttagtgttggagaacattttttagaactcagtctgcctatagtatttttgaatactgtgtctatacacagtatagacttagtacctgcccttaagctagataggtgaacaagcaattataatttagctttgtaagctattcatggactaagtcagcagcctgtactttttttttttttttttttttttttgagataaaatcttgctgtgtcacccaggctggagtgcagtgagatgatcattgatcatggctaactgcagcctcaacctcccaggctcaggcaatcctctcacctcagcctcccgagtggctaggaccacagttgtacaccaccacacctggctaatttaaaaaaaaatttttgtagagatgggatctcactggtctcaaactcctaggctcaagcagccctcccacctcagcctcccaaagtgctgggattagaggtgtgagccactgcacccagcctggattctatctgatgctgaagtcggtggcttgattctgtcaattcagcctctgaaaggtcgtttgaattcaccctttctagccccactgctctggtcttagtccaggcctttatatattttttcactttactactttgctcttaatggttgctgcttcctgactcgtctggcttctctgttccacttcattttacactcacatgttgccaaaataatctttgttatgtgctgctcccacaataagatctttccccgtgcttttatctcctaaggtggtggacctcaagccttttggtatcaaaacccttgtgtcctcttaagtgattgaggtccccaaggaacttttcttcatgtggatttttgtcttatcattgtctgccagattagaaattaaaaccaagaaatttacacttaaaatagctgtaataaacctattacatgttaacataaataacatttttatgaaaactgttcacaaaacaaaaaaatttagtgaaaagtggccttgttttacattttttgcagatctctttcatgcctcactgaataaaaagatggctgaattccataactgctcctgtagtcagtttgttgtgaaacgttgttttggttgaaatagttgaagaaaatctggccttatacagatatgtagttggaaagaacaggagtcttttagtggcatttccagaaaattgtggttattttgtgatactgtaccaaaacttgacactgggtagtttcttaaggattggttgcagtgtagaatctgaagtcatataagtgaactttttatcctctgttacaataaaatctgttgatccatcctatactttgaatggctattttacccctgtttgatttgaccaatacatacaacatcatgtattggtcatttggaaaatactgggtcactgagttatgtaaatcttacaaatgttgacacatttcattaaacaatatcacaaaatcgtgtttgttatcaccacccatcttattagaaaattctttaaatgttgagaagcagtctagctcataatggcagatacaagttttccaaaattctaattttcaccccaaattcaaattttatcatgaacagcaagtactgtcagttgtttttcttgcagcatcaggcttgctttatttttgagaaactgtgccagatacccaaatctgaataatcatagttttttttggttgttgttttgccaaataaaaatcgagttcctgtaaaaaaaaaatggctagtttagctcacaactcaaatgattgcacagtgattttcttggacattgttgtttggtgtagcacataaatgctttgagtatctagtcatacaagcattaagcatgtgtactcaagggctgagatttaataaagtaataatttttcatgattcatcaaagacatcctgttgtaaaactgacttttttttttttatgtgagtgtttggcagtgaagaatccagtgaccacactggtacagtttggtgccactgctaaggtgggagcagttttacccaccattgtttttgtatcagtgtaaataaaatcacagtgaaaagagcaggtcttgcctgagtaccatcatgatgatatggtttggctgtgtccccacccaaatctcatcttgaaatgtagctcccataattcccatgcgttatgggagggacctgatgggagataactgaatcatgggggcagttcccccatactgttcttgtggtagtgagtgagtcttaggagatctgatggttttctaaggggtttcccctttcatttggctctcatttctctcttgtgaccgccatgtgagacataccttttgccttccaccatgattatgaggcctccccagccacctgtaactgtgagtccattaaacctctttttctttataaattacccagtctcggtgaaaatgaactaatacacgtaagaattttgaccatctgaacccccatgaaagggtcttaggactcccagggatccacagaccacaagagaattgctgccttgtaggataaaatctaaaccttcactcacagtttagagtgcattatgctgtatccctgttgaccttccccttttcctcttctatttctcttccatctggatctcaccatagaatgttcttttgtcactttagctttacagtttatttcccttctgcctccccctatctgtcccttatcctttaggcctaactgggtgttactgaagtgaaaatacccgtacctgccgcagctatgagtcattttccctttgatttccagcactgaacttttggctctacctctttccatctattttctagggacctctgatttaaagttccgaatttacaaatcccatcataacaggaaagcattttacatccctcttgtgacttaaacttaatttatactaatatttttcattttgaaccttcttatacctaattaaatgaaacatttgagcaaataggtgatggggtattgccttttttggggtcttctgttctgtcagaaatggtattatagttaggtctagcccagggaaaaaactgatttcctttaacagttatttgaatgatacccattttcctaatcaggaaggtttcttggtattatctaggtactgggttttatgctgccaagttcatcagttaaatggcctttagataaaggacaggttggagttgtgctcagctcatataaaatgtgctttagaaggacttctggtattatctgacccacactgcccctcatgtcacacatgtttctgcacgtacacaggatgagtactgagtacccttcatgtttcagggattctgcaggtctttcacatatgccatctaaaatttgtttttcacaattttgtgaactagatgacaagatccttgtgttacagatgaggacctcgaatttgctgccatttgtgtaatgaaaatataaatggcatagtgagtagctgaacttaaataaaaaatcattgacttaccacataaataatagtattataacattataaaacaagatttggtataaatgagctttcatcagtatagacacatctcaggcattagtctaccttgcctagaaggagcaggaattatttattgagcactgttttggatatatactgaagttccctcaaattctaatgtctcataactcttcaggcagttatagtaattgctggatataccaggaagttatgcctgtaattactgctcagaaatgaaatatgtaaactctagcattatattcatactggttttattatgagatatattaccttttagatttcttataagatctattttttagatttagcttacaaagccattaactgttataaaattatactgtaaattataagctttagttagatgggccgttaggcatagctttgctggcaactgtaaccttttatgattgcagtcaaaatgtaatccagatgctcttcgtaatagaccattgagtcagaatatcctgaatattgttttgcaggttcaaaatgttggaagagatctgaatcaggatgataaaatgacattcacccatctgattttgggcttacttctttgtgacatacctaacctggtgattaaattctttttttttttgagatggagttttgctgttgttgcccaggctggagtgcaatggcacgatctcggcttaccgcaacctccacctcccaggttcaagcaattctcctgcctcagcctcccgagtagctgggattgcaggcatgcatcaccacgcctggctaattttttgtatttttagtagagacggggtttctccgtgttgaggctggtctcgaactcctgacgtcaggtgatccgcccacctcggcctcccaaagtgctaggattacgggcgtgagccaccacacccggcctctgatgattaaattctaaaaccaagagttatttaaaagattttgtagacagtgggggttggaacttgaaagtgacccatcagctatgtagctactagcattttcctaaaaagtcctcagtgaggcagctggacaaggttgagaggcaggcagcatagccaagggattctggagccaagctgctcagctactgtcttagcccacttcgtgttgctgtaatagaatatctgaggctgggtaatttataaagaaaaaggtttatttggctcacaattctgatggctaggaaggtcaagttagagcatccggtgaggtcctcaggttgctttcactcagtgtggactcctgaatgtgatgtggatgtgaagaaactggaatcctcatacattgttggtgtgaatgtagcttggtgccgctgctgtgctaaggggagctagagagtgcagaggtcacatggtgagagaggtagtaggagcgggatgggaaggggccaggttgttaacagccagctcatgtgagaactaagagtgagaactcactcactcttggggagggccttaatctattcatgaaggatccaccccatgacctgaaaacacctcccactaagccccacctccctacactgccacagtggggaccaaatttcaacctgagatttggtggggacacatagcagttactagctgtgtaaccataagcaagctatttaacttttctgtgcctcagtttcctcatctgtagaatgaggtcgatcacagttcctgtctcataagattgttgtgaggatgttaaaacagcgcagtgcctcactaaatagtaaacactgtataagaaatgattgttattattcttatcacctgtgatccaagcctggaatttataatttaagatacgaatgaagttattatatgtagttttgttaccagttgattatatgacctctcttaatttctcagttgctctttccatcatctggaagcttcgccatttgttttaacctttgaagagatgagaggaaaagatgcatgataggcttaaattgctctcatctacttataaaaaataattagacataacgtggccaggcgcagtggctcactactgtaatcccagcactttgggaggccgaggtgggtggatcacgaggtcaggagttcgagaccagcctggccaacatggtgaaaccccgtgtctactaaaaatacaaaaattagctgggcgtggtggcgggtgcttgtaatcccagctactcgggaggctgaggcaggagaatcgcttgaacctgggaggtggaggttgcagtgagccaaggccgcaccattgcactctagcctgggtgacagaatgagactctgtctcaaaaaaaaagaaaaaaatagacataatgcaagataacgtcattaaaaagtgggcaaagacctgagtaggcatttttccaaagaagatatccaaatggtcaaccagtacatgaacagatagatgctcaaaattgttagtcattagggaaatggaaatcaaaactatgagaataccactttacaaccattagtatggctatcatttttttttaaaaaggaaaataacaagtattggtaaggatgtgaagaaactggaatcctcatatattgctggtgtgaatgtagcatggtgccacagctgtgtaaaataatttttcagctcctcaattagatagatacagagttatatggcttagcaattccattcctagctatataccaaaagaaaacaggtgttcaaacaaaaacttgtacataatattcatagcagcattatttaccatagccaaaaggtggaaacaacccaaatgtccatcaacttttgtgcatcagtggacaatgtggcatattcatataatgggatatgattcagctataaaaagaaacgaatgatatatggtacagtataaacgtaccttgaaagcatgtagaataaacatgaaaacatgtataacatagatgtaccttgaaaacatgctaagtgaaagaaggcaatatactgtatggttcctttttttttttttttgagagggagtctcgctctgttgcccaggctgaagtgcagtggcatgatctcagctcactgcaacctctgcctcccaggttcaagctattctcgtgcctgagcctcctgagtagctgggattacaggtgcccactgtcgtgcccagctaattcttttgcatttttagtagagacagggtttcaccatgttggtcaggctggttttgaactcctgacctcaagtgatccacctgccttggacttccaaagtgctgggattacaggtttgagccactgcacctggcctgtatggttccatttatatgaaatacccagaataggcaaatctgtggagacagaaagcagatgagtagctggggcagagcataggatttctatttggggtgatgaaaatgttctggaactagatactggtggtggttgcacaacttcatgattgtctgagatgtcactgaattgcatactttaaaatcagttcaacagtaaattttatgttatttgtatgatgctgcaatttaaaaaaaataaatatttcgacatgacgttttttccaagtttaccttagttgtaattttgccaaaatactttcttaaaccattttattgtaattttaggctaagatcatttgcactttatatatagttgaatgaaatatatcgtagttgttttattctcttgtaaatctagaaaagatgaaaaatgaaagccatgagagttttaagtatgtctttgccttgtgcagatattctcaaagggtattgtggagcccttggggctccttatgaccttttcaaagggtctgcaggttcaggttattttcatagtaattgttgagagttatttgcttttcaaatttttatttatttatttatttagagacggggctttgctctgtccccagcctgcagtgcagtggtgcaatgacagctcactgcagcctcgacttctgggcacaagtgatcctcctgcctctcagcctcccaactgggactgcagggaggcattgttttacatttacatgccaccatgcccgctagtttttttatttttcatagagatggggttttgccacatgttgcccaggctgatcttgaactcctgggcttaagtgatccacccccatctcggcctcccaaattctgagattacagaatttgtaagcataagccaccacacccagcctatttgctttttttttttttaaactctttttctccacaggtgtaaagtgtagttttccaaacgctctataatatatgatggtgtagtctctttgttggctaatggtctatgtacttgtatatgtctggatttttttgttttttttttacaattctctaaggtaagctctttgtgatcctcaataatttttaagtgtataaaagagtcctgaggccaaaaagtttgagaacaaaatgtcttggtaaaaaatgtatgtgccaataatgaaaaagcatatacgaactacttgtattatatatttttgaaaacagaaggaaaataaattgtaagccaaatgactcttttggctgcttagcttttatcatctttactgcttcagaggttactagatttggaaccaaagtgtactttttgggatgcggtaggtttctggttttaaaaaaggatgtctggtattgattaaatctatagttttgaactttctaatccagcagctctgtggagtaggtactgatacttggattttataaccagggcacaaaatggttaagtaacttatctgtggtccgacggctagtaagtggcaggtctggtgtttggatccatgaagtctgtttcctgagtctgcactgttcacagtatgcgatctatgtaataccgctccttatgtacattgtataataatagctccctgggaatgtatgtgtgaagttcccatttggaaggctggcatcgtagtactgcactgatagtggtggcagtgattgtgaggtgggttgggttctggtgcctatggcaggggctccagcaagcagatggttagaagacagatagggagcaaggataggaggatgggctgctataggggccagacctcctgcccaggatatttctggtccagttcgaaagttggacctttccttcctagagattggctccacttatggctttataataggacctcttccccttctggagtcctttggagcaagatgcattttcacagttttctcccaacctctttacttgagtctagcacttactgcctttgaacttctctgagggtttttactaccaactagaaatgaaagaaaaagttgaagagggagatggtattcaaaagataagtgatacaaattggagtcttttaggattcatattattgaaacgcaatttgtcaacctccctaagagggtcacatcactgtggtgtgggcccccccaaggcatgtcatcactgaggttaggatgggctctctgccatgaggagtaagccagtgcctccagctactggctagaaacagggagtgttgtcaggagatctgcactggggctgaaggacatccccgcctacttcccttttgctcttcttactatcagtctttactaccgcagatccctttctagggtccacgacctttgctggggtaaagtgggatgcagggatggggcctggggatgctctaggcagtttgcatgaaggagtggctccattggtgttaaagattaggccttctgatactttcttctccacttgtactttgagttaaaggctcttacctcaagagattttctttactctgtggccatatctgtaactgtccttaactctctgtgcatggcagccccaaaccttcccagtggaacagtgcaagctcagagccttgcaggtcagtgaccccacacttggcacaggaattccagggaaaagtgtgaaagggcagtaggtggctcctccgtcctgcttctttgaaaacctctgacctaaaaggtttttgaagctgaatatttaaagaaaatatgtatgagattgtagagatagatgcctaggcggctgaaggggatgtggcaagtggatggcctccctcagggctcctttccacctgtggtggccacaggttcaagactcctgtccaaacattctggtttgtttatgtgttccagaaacagacagagaagaaggtattgtattttttgagacagtcttgctctgttgcccaggctggagtgcaatggtgcgatctctgctcactgcaggctccgcctcctgggttcaagcgattctcctgtctcagccacctgagtagctgggattacaggtgtgcgccactatgcctggctaatttttgtatttttagtagagatggggtttcaccacattggccaggctggtcttgaactcttggcctcaagtgatccacccgtcttggcctcccaaagtgctgagattataggtgtgagccaccatgcctggcccaaactggtattatatctgcatgaaaaagggtcactgtgccaatacttttttcatttaagtttttttttttttttgagacggagtctcgctctgtcacccaggctggagtgtcgtggtgcgatctcggctcactgcaacctccgcctcccgggttcaagcaattctcctgcctcagccgcccgattagctggaattacaggcatgcgccaccaagcccagctaatttatttgtatttttagtagacatgggggtttcactatattggccaggttggtcttgaactcctgaccttgtgatccacccaccttgacctcccaaagtgctgggattacaggcgtgagccaccgctctcggccctcatttaagttttaatatgtttgtgggtagaaaacgtcttaattttttttttttaatctcagaaaatgacatgtgttggtgttgagatctctcttgagtggcttcatcatttgttcgtatgcccaatgtagaaccttattctttatcctgaattccttcctcccccttacacctgatttaattgtgcactattgatctggcttagttctggaacttctctcactctcactcaggtgttgccctagactcataggtgctctctctccagccagttttgacctctccatatctttttccattagagcagtagttgtcaaactttttgattaaaactgagaggccaggtgccgtggctcatgcctgtaataccaacagtttgagaagcccaggtggtaggatcacttgagcccaggaccagcttggacaacatagtgagaccttgcctctaccaaaaagtaaaaaaattagccaggggtggtgacatgtgcctgtggttccagctatgtgggaggctgaggtgaaagcattgcttcagcccaggagttggaggctggattgagtcgtgattatgtcatgacactctagcctggattacagagcaagacactgtcccagaaaacaaaacaaaacaaaatctgagaaattacttattccctaatttatgatttggttattaacttatttaaaatgaaaaataaacccatgtaaagttagtatacatagctttttaatgaaaatcgctttttttttttcccaaaacaacaacataaaatgtagtcggaagagtggccatcgttcacttatgtgttgcagacctccttaatgtctgcctggatggaagagtttctcatccagtgcatacatgcatgaatcattgcagccaggtctcaaccctgtcagacaacactctctttttgtagtaagtctttggtaatgcttcttttattcttaagaaatgtattcatctcagaattcaaatgaaagtaacatactaacatgataatagttcagtgtgtcagtgttgtctcagctacactaggatcacatgctcactaggtcaggtgcactgagaatgcagtggctgcaaatgcacacggtagaggtacattacttggtgattcaaatatcaagaagggcattagatgtaatgacatgttctctaaaactgtgagcaacttttggtaaaatacaaaacagtcttttgatttatgtggtaattatattcctagcaaattgaatgtgtagtgaaacttggaaaaagtcttttgtgattctgtgtgaaatggaatttggttttaggttccgataattatacatggggttttcccctacattactatctagagaaacattcaaaagtcgtatgggacaattcctcatatgggactgttctgcacaacctgttaaataaatgccagtggtgcctcccagcgaatgagaccaccaaaaataccccacggattttcacacatccattagggaatggtacatacctattaagaacactgataagtggaatcttggctgtattttttttcttgttttttgtttgtttgtttgttttgagacagagtttcaatcttgtcacccaggctggattgcagtggtgatcttgactcaccgcaacccccgcctcccggattcaagtgattcttctgcctcagcctccggagtagctgggattacaggcgccggccaccacgcccgactaattttgtatttttagtagacacgggtttcaccgcgttggtcaggctggtcttgacctcctgacctcagtgctgggattacaggtgtgagccgctgtgcccggcctgttttgtttttttaagttggatgataatttaaaaaataacttacaatacagcctgaccaacatggtgaaaccccatctctactaaaaatacaaaaattagcaggcatggtggcgcacgcctgtaatccgagctactcaggaggctgaggcaggagaattgcttgagtgaggttgcagtgagctgagattgcgccattgcactccagtctgggcgacaaagcgagactccgtctcaaataaataaataaataaataaataacttacaataataattacttgaatctcaccgttaatcagtgttaatattttgttgtatatccatcttgtccttttttgtacatttgtagtttttttccattcaaaaatgggatcatttaaaaatttaaaaagagtcgatgtcttggctgggcacagtgactcaacgcctgtaattcccagcactttgggaggccgaggtgggcagatcacctgaggttgggagttcaagaccagcctgaccaacatggagaaactccgtctctactaaaaatacaaaattagccagcgtggtggtgcatgcctgtaatcccagctactcgggaggctgaggcaggagaatcgcttgaacctgggagacggaggttacggtgagctgggcaacaagagcgaaactctgtctaaaaaaaaaaaaagaattgatgtcttgatgctacttaattttatctaattcacgtgtttttaaaaatcataacaaaatcagttttattcttcattctatcatacaattagtacaatctcaggtaagatgcaaacaatgtatactcataagtctctttttaacatgaaaactggtgctacctagggaagtacaaatgaaaccacaatgaggtaccacctccaacatgttaggatggccattataaaaaaagactgaaataataagaattggccaggatatgaagaaaagggaacgcttgtacactgttggtgggaatgtaaattgatatgaagcagttatggaaaacaatatggaaattcctcagaacattaaaaatagaactactgtatgacccagcaatccctatacccaaaggaaatgaaatcagcatcttgggaagatatctgcactcccatgttccttgtggcattattcccaatagacaagatatggaaacgattttttttttttttttgagacggagtctccttctgtcgccaggctggagtgcggtggcgcaaactcggctcactgcaacctccgcctcccgggttcaagcaatttttctgcctcaggcacccgagtagctgggactacaggtgcgtgccaccacgccctgctaatttttgtatttttcgtagagatagggtttcaccatgttggccaggatggtctcgatctcttgacctcgtgatccacctgcctcggcctccaaagtggtaggattacgggcgggaggcaccacgcctggcggaaacgatttaataagtgtctgttgccagacaaaaaaaataaattggggcatatacatccagtggaatagccattaaaaaggtgatcctgtcatttgtgacaacatagatgaacctggagagcatgctgctaagtgaaataaactagaaaaagaaaagaaaaatattgcaagatctcacttatatgtggaatctgaaataaagctgaatatgtaagaatagagtggctgagtggttatcgggggaaggggaagtgggagatgtaggtcaaagttgcagttacataggatgaataaaactagagatctaatatttagcatgatgactctggctaatattgtattggaaaatttgctgagagtagatttcaggtactcttaacacacacacgtagctatgtgaggagatggatgtattacttctgactgtagtagccatttcactgtgtatatgtataacaaaacatcgtgtcatgtaccttaaattatacaataaacaaagaagaggtgccggtttgaaggggcgaggacagagcgtggacttgcggaaagttaggtggccttggtgatttaatctctcaaaccttcggttttcttatctgtaacacgtattagagaaactgtgtcttgtcggaacctacccctcagtgggggtaatcccagctgtttgtcctcagctcatttctaactgaactgcaggcttctcaagagcagccaggatgtcaccttttcatcacctagcaccagctcaggacctggctcattaatttattgaacaaatgaatgtggcagaaaatttgctattggtgttggactgtgtttaaactttgtttcatgtttatcatggttaaacctccatcagaggtaaacaactatgttaattattacatcaaacttctgtacatcttgccccaaatgggatcatttatttgttcaggataaaatgtttttgaagtttttagcacacctgatagttgtatttcttctagattgggcttggatattgttattactcaggaatctggttgaatgtttgattgtataactctgcctttgacatatgtaattaaatgagtttgtatttaatgtgttccttgaggcagccaggtgtatttacctcagaactgttgaaggcttgccatgtctctaggactcattggtacctttaaggcatctctacaggtatgattttcttttactgtggattctttttttctttcaaaagtttttcagctgttagatatttagcagctcagtctgtttgaatgatttaatgtgttactattgaaaattactttgaaatacaatttgactgttttcaagagagtttggattctgaaggcccacagcgtataggctgaaacagtggttctcaaatctagcatgcattcactggatctgggacaggatccaacagtttgcatttctaacaagttccccattaatgctggtgctgttggtgtggggaccagactttgagaactattgggctaaagtgtggaagacaattaaaaataataatatggaggggaaatggggcccagtgtgtttgggaacaggatccctttgtgctctccacagacaatagagcagtaaagaaaaactggttttggcacctgaaaagaaggaaaatagacataaactttagaaaatactgtttgatagttgcagtggtccttaaaattaagataggagaagagatttggaaataatttaattttaaaaagtttattttaccttttttattataggagtaatgcatgttcataatggaaagtgtcataaatacagaaacatttctattctaaaagagaggaaaaatttccccaaagtatcttctgacatttttggcaatgtccattcagtatctcttttatgtgtaggacttttgtttttgttttgccatgaaataaagtttttattgtcaaaataatatatgctcattataatgaaagaaaaagaaagatcataaaggacactcactctttccagaaacaatactgataacatactgaagtttattatttggtatctcttcatgtgaatatatccatttatgtgaattaccttgaccatatggttttataacctaattttttcagtcactatcttttcatatcattagatgtaattctgaagcatcttttttaggcgcagagtatcttactctgaaaaactttgttgtagctgatgctcttcatccactggcccctcccatttctcatttctctactaggaatttgtaggtcaaagagcatgtaaaaatcttgatatgggccgggcacggtggctcaagcctgtaatcccagcactttgggaggctgagacagggggatcatgaggtcaggagaccgagaccgtcctagccaacacggtgaaaccctgtctctattaaaaaaaaatacaaaaaattagccaggtgcagtggcgggtgcttgtagtcccagctacttgggaggctgaggtgggagaatgacttgaacccgggacggggagcttacagtgagccgaggttgcgccactgcactccagcctgggcgacagagcgagactctgtctcaaaaaataaaaaataaagaataaatcttgatatgtattaccagatacccacaaagggcatagaagtttctgttctcactagtagctgtgtgcctgtacccagaccccaagtctatgctcattgccggtttaataattgccagcctgataggtgaaaatagtatcttttcattcacttcttttactgataagaagcttaacacttttcttcatgtgtcagttggtcgtttaaatttcttttgaatttctgctcttgtccttgtcacattttcttttggggttaatcttttttcttgatttatatgaactcttcatacttagggacattaattccttacatcatatgcttcagatatttgtttccaaaatttcatttgcttttaaaactaacttgtggaattttttttctttcatagaagtgttttaagtgtttcatagaagtgccatccactatgattttccttttttttgtttttttttttgtttgacatggagttttgctgttgttgcccaggctggagtgcagtggcacgatctcggctcactgcaacctctgcctcctgggttcaagcgattcctgctaatttttgtatttttagtagaaacggggtttcaccacgttggtcaggctggtttcaaactcctgaccttaggtgatccctccgcttcggcctcccagagtgctaggattacacgcatgagccattgcgcctgtcctgattttccatttttaaggatttctgctcatggtgtcaaatgagaacatcccctgtcacttcaagattttacgaatattaacctgcattttcttctacaacactttctcttttttaaaaaacgtttttaaaggtggagttttgctaagttgcccaggctggtcttcaactcctgggctcaagcaaacctcccacctcagcctttcaaagcgctgggattataggcatgagccaccgtgcccagcctctgccacacttccatgatttcatttgttcactagggtcttcaaactgtctgtagtttgttttgatgcaagcaaatacatttattttagtgtggccaaatgtaatttacatttttaaatattgaattattttggttgcactgtgcaaacattaggcaaatttaggtataaagttggaaaaagccactaagtgtcacactgttctgaggagcactgggaattctgagaaggcttaaagagtttgccatggttttctgtccttgtgatagtttgttcggaatgatggtttccagcttcatccatgcccctacaaaggatgtgaactcatccttttctatggctgcatagtatttcatggtgtatatgtgccacattttcgacagaaaaccaaacactgcatgttctcactcataggtgggaattgaacaatgagaacacttggacacagggtggggaacatcacacaccgggacctgtcgtgaggtgcggggaggggggagggatagcattaggagataaacctaatgtaaatgacaaattaatgggtgcagcacaccaacatggcacatgtatacatatgtaacaaaacctgcacgttgtgcacatgtaccctagaacttaaagtataattaaaaaaaaagagtttgccatggaagtggaggtcaggagaggggagaactgagcaagtatgtgggtatttccagctcctacttctcccaagaactgcaggcttagatgggcagctgtctagtaggcagatcttcttgggcatctaataataagctgttcaaaattaacatagccaaagcagaattcttttttttttttttttaagacagagtctcacttatcacctaggctggagtgcagtggcatgatctcggctcactgcaagcctcgcctccctggttcaagggattttcttgcctcaacctcccgagtacctgggattacagttgtgtgccaccatgtccagctaatttttatatttttagtagagacagggtttcgccctgttggccaggctggtcccaaacatctggcatcaagtgatccacccgcctaggcctcccaaagtgctgggattacagacttgagccaccgcacccagcccaaaacggaattcttgatgctgtccccaccctaatgcgcacaccccagtcctttctcgtcttagtaaatagcgctgtcaaacacccatttaggcaggccagaaacttcaaaggtgtctttgattccgctcttccaccactttatatctactccatcatgaagtcttgtagactttctgtccagaatatatcctgagtctgaccactcctaatcatttccactgttaaaacattaggccaccactgtctctcatgtgggtgtttattgtggtcttctggacgttgtcttggttccactttgtctctccctgtaatctgtttcacatagtagcttctacagtgtaaataagatcatattattcccttgattaaaacctttcaaagacttcccattacatttaaaataaaatccaagccttactataaaagatccacttgtctggcctctgtgcttctccagtttcttccttctgcactccccttgtctgctttgcggtagcctaacatgtctctttctatctcttgaacaggttcttttctttcgttgggtctttatacaggctgaacctcctctagaactaactagaagctacctctgatgtcttctcagagagactttccttgactatccccaggcacatgaagaagccccacacaccccctctagtcaccatctatcttgttaaccttacttattttcttaaagtggggttctgtatgtaaaatgatcttctttatttgtttactggtttattagctgtcttcctattcgagaatgtaagctcccagaggacactctgttttgttcacttctgaatccctagcacttagccccgtgcttggcccatgacatttgtggtaagtactaggtgaccatttttggaactgttcccaccccacggcctgcattcacactttaatcacagcagctcagcttttatatcgtgagcttcagtgggaggttttgtttacagaaagttttcttggttgacaaaagcctgaagatgattttcttggaagatgaggatttattctaaggatatgtgaggaagcaaagtttttgttgttgttgttgttttggaggggtggtgggggatccgagtctcgctttgtcatccaggctggagtgtagtggcgcaatcatggctcactgcaacctctgcctcccgggtttaagcgattctcctgcctcagccacctgagtagctgggattacaggcatgcgccaccacgcccagctaatttttgtatttttagtagagacagggtttcacggaagcagagattttctgtcagtgttccatctacttcataatgtattgttgatatggttcttgattttttaacctgaaggcataagcatgaaaatagcataatgatttttcacagttcctgtccaagagtactttttctttacatgttgaattacctaccatagattgttttatcctataattagaaagattatgagattacatcatcttatatttacccttaaagagtgtttcccgaatcataagccaaagcctttgtataaccttattatgtaaatatttatgtttcaggtgtgttattccctttgtgtgtgtgtgtatctatatacatatatatgcatagtatttgtgttctcttattcctatgacattgtaaacgttctagttgatgatgtctgtgcttccattgcaactcttcactgcatgggtactctgatgtgtatggcttgctgctccccagatattcgttgactttgtgacatctgtcctaggacaatttcactattttagtttttggctactcagttaattagaaatgcatctcagttgtattttaagttattgctttctacattttaatcagtaaatacaaagagattgcctttagtttttgttatgtgtattttcaggttatgttactgggagtacaaagttttacaattgttgctttctttgtggattataggttttaggaaaataaaatttatcgtattgacagtttttgccttgaaaggcttattaaatttagcagtcctcccttttttgtgtgttttttgatccttatcctttttttttttttttttttttttgagacggagtctcgctctgtcacacaggctggagtgcagtggcagagctcactgcaagctccgcctcccaggttcatgccattctcctgcctcagcctcccaagtagctgggactacaggtgcccgcccccacatccagctaatttttttgtatttttagtagagacgaggtttcaccgtgttagccaggatggtcttgatctcctgacctcgtgatccgcctgtctggtcctcccaaagtgctgggattacaggcgtgagacaccgcgcccagcccatccttttgtttttaatctgtcattttattttaggtgcatttctagttcgcttggcctgctgtctttttcataacactttattcctatgtaatagatataatgttcttttgcattttattgtttctaaagcaaatatcttctaattaagaaaaataacttctagttaatttatttcaaggggaagcagtgggggttttattcctctggatgtttgttgtcttgtgtcctgtggaatattttctttctgtttttgttcttttctttctctaactcaggacagtgctgaggaatgttttcattggtgccgtattttctttttctttcttttcttttttcttttttttttttttgagacagggtctctgtctgttgcccaagctggaatgcaatggcgcaatctcggctcactgcaacttctgcctgctgggttcaagcgattctcatgcctcagcctctcgagtagctggcattacaggcatgcaccaccacacccggctaatttttgtgtttttatagagaaagggtttcgccatgttggccaggctggtcttgaactcctgacctcaagtgatccacccacctcagcctcccaaagtgctgggattgcaggcgtgagccgatgtgcgtggcctggtgccatactttctgcatttttctttaaggaaggttccaaatgtctgaagtccaccaaatgtctgaagtcctgcccagacttttggagagaaaacacagcaaagcaatcagtaggttaatgactgcatggtttctggaccaaattatcctcatctaccacttagaacattaagttgtaaaccagagtcagcacagccagggtggagattacttatttgtatcccttgctcgtaggttatttaatattctctgttgtgtcaaagtttagtcgggtatattaattagtcagcttttgctaaattatgttgtggtaacaatctccaaatctcagtagtttacgacaacaaaactttgtttctcagtttaaggctctttgtgggcttcatgccatggtagaacctcaaaagtggcatgtgccatttcaactcatacttcattggccaaaagcaagtcacgtggtcatgcagggcctcagtaagcaagaaatatttacccgcccggggatggacaggtaggaaagggtctgttaaggaagggcagcaaatatttggataacagtactatgtgtttgtatggagcgatatttaagaaggtttcctaggttttttgaggggtattgaagctgagaggttgggggcaggcaggaagctctgcagcctgtagcctatggtatcaagcttcatgagaacgagaattaactagttacatctttattaccatttttggcatctctgcagacagtggatctaatgcatgatagctgattaataaatgtttgttgaattaatgaacaaaatagcaagaaagtaacgtattctgaggcaggagaattgcttgaaccaggaggcagaggttgcagtgagctgacatcatgccattgcactccagcctgggcgacagagtgagactccgtctcaaaaaacaaaagaaagtaaacagattattttcatgctatttgatgcctccgcttagtttggaaccagtttttattttattttattttattttattttattttattttattttttgttttgtttttgttttcgtgttttttgagacggagtctcgctctgtcgcccaggctggagtgcagtggcgagatctgggttcattgcaagctccgcctcccgggttcacgtcattctcctgcctcagcctcctgagtagctgggactacaggcgcccaccactatgcccggctaatttttttgtatttttagtagaggggtttcaccgtgttaaccagggtggtcttgatctcctgacctcgtgatccacccgtctcggcctcccaaagtgctgggattacaggcatgaaccaccgcgcctggccttggaaccagttttatagagcagttcctacaatagctccttttatatttaaaatgaaaagtgctttcttgggggtcattttgccataccaaaagattatgtgcttaaaaaaaaaactacatactaattacagaaaaaattttaaatatgcattaaatacaagcaagtagaggttgtgttctatttggctactcaggacaactattggtgttttgttatatatcctcctatataattcctttctttcttttcttttttttttttttgagatggagtttcactcttgttgcccaggctggagtgcaatggcgcaatctcagctcaccgcaacctctgcctcccaggttcaagcgattctcgcttctcagcctccctagtagctgggattacaggcatgcgccaccacgcccggctaattttgtatttttggtagaggcggggtttctccatgttggtcaggctggtctcgaactcccgacctcaggtgatccacccgcctcggcctcccaaagtgcaggggttacaggcatgagccacatagtgcccagcctctttcttttcttttctttctttttttgagatggagcctctctctgttgcccaggctggaagaatacagtggcaccatcttggctcactgtaacctctgcttcccgggtacaagtgatgcttgtgtgtcagcctcccagtagctggcactacaggtgtgcaccaccacacccagctaatttttgtatttttagtagagacggggtttcatcacattggccaggctgatctcctgacctcaggtgatccactcacctcggctgcccaaagtgctgggattgcaggcttgagcccttttttttttccccatatggcttctgaacattgtttatatttattgtcacactaggatcacttagttttgtacttttagtagtatctattgctttatttgttatgttgccaatcggcagttgtaaaggtcgtagatgaaatagacaagtatttataagattaattttatcttacccttgttctctttttctcttcttgaatttcctccttcaaatatatgaactatttacttaaccaaacactctctttctcttccctctcaccatggcaagagtgaaagggaccagaatgatgaaaggtagacagttggcctgaggaaataaggtgccttggcgattctcagactggataatcagctcctggggaatcaggcgctgacttttttttttttcctcctgcttttactcagagatcatcttttcatattttgggatttgtgcagtcatttcaatgatctaaaagtgaagagcttgataataagttgattttagtcctactgtctttttgtgacggatgtgctagataagcttaatgtgagtcattcaagaaccaagcccctgtttgaacctgtccattgagggccctgtttatcagaggttgaagcattttttagctagcagctgatcttgggtaagcaagccattgtacaagttccccatgcctagttgttttgcatcattaatcatcttttcttcaagccatggaaacatggctgagtcttgagtcatctggctcttcccagtgctggaaatccaccctgctgaggtgaatgtgtgaaatattttttgttctcggtagagatctgagaactggtttgtctcctgcaatgaacagattgaattccttataaatatgttactaaaaggtaccttttgtgtccattttacagatatctgacatgattatttattaaactcctttaaataactcctgtgcttaatgcagtttccaaatatttgaaatactaaatgtagatttagggaactcagtgaccagttttcatttgcattttgatgaatttctctattttaatatttgtagttgctatccattttagaaatatccactctgccaagtaggttgggaatgtgtgcaagaatgacagcttaaataatgtgcttgtttgctattggagccgatgcccctaagtaaagctaccagataaagagaggaaagggggaaaaaaggaggagaatgaagccaccgtgtaacatctgttagagactcaatgtgagccctgtgagttagtcttcatttcccatgctatgttttatttttatttttcctgttccattaaagcatttcggttaattctgtataagtagaatgctgataactccttagagaaatgtgattcagtaataaccttgtttccatgtgactacttatctaatctgccatgcatctgctttaaggaaggtgtccattagggtcaactcacaggtcagacattaatcttaattgtcaaatgtctcaactcattgctagagactaaattgatcttgatggcactcatctgagtaccgattcacactaaaagacagtcaaggggttgttttcctttgtgtgttgtaattcttagcaggatcctaaaaatgaaagttttaaaatgtggaatagcatgattaatgaggacatttattaaggttaaggcagtttaaaagttcagtttaatctaaggttagcttgtaggaactgatataagagatagttaaaaatttgttaagctttacttaaaacctgtatttgggggtagaaacagttttcctagggtacttataatttcctttaattatctcagaaagagggtctcttattaggatgagggaaaaaaatgacccgtcattcttttaaatcaggtttaatttattcctgatatttatatgattcttatatgtcatgtaattcttatgacatataagagagaaaacattaatctagagtaggtaatttcctagttcagcttcttccacttgtgtgaactacagaagaactgaagagtaattgtaattgttttataactttaaagaatttaagagattaaattgctgtccttgtgaattctttgttaagtaactctcaaagaaatagtcaagttaaaggggatttactttctaaaactagctttcttttctttctgtctaaccttttattatgaaaaatttcaacatctacaaaagaaaggagagtagtatcattacccagctacagtcactgttaactctcagctaatcttgtctccatcctgccaccctccactccagattattttgaagcaaattctagacatcacttccttttattaaagcaagttgcgtttcatagtgacaatagaaaccatttactcttggcacaggtgctaaggtctgaatacaactttaaggagacagtgtctgcattgaagagcttatgttttaagaaaggagtttatgttttcactggatatactcggcgttcagggaatcagagactttcttcaagtttcccttgtcttttaaatagggacgtatttgcaagttcttatctgtttggaaattcctgtagcaagttcaggtttagtcattctgtactgctttggtggtgccttatctaaatagtattgaaaggaagaaagaattatttcaccaagagttggccttgaaaggagttagatgtattgggtatatttaggaagtaccccttcaacgctgtaataatataccaacttttaaagctacctcataatagctcttaaaaacacatttaaaacacttagaggtgatcctttttcctagccatcagtgggacaaattaattcctttttgagtaaaaaaaaaaaaaaaaaaaaaattctctttttttagtactcaagatcagcaagtattggttgactcattctttgttgttaaacctcttggtttctcaggccagtgtgtctttttgtatactttgaccttgcactttaaactgaattccttttgtcctttgagggaggcataaagctgtcagttcctgttggtgagtgtgggaaattgagttttcactcttctctataatttctgcatttcaagtggttttaataataatcataactatttctcaattttacttcttaaaaaagtagattcatcagactgaattgaatatttgttttccttctaaagctgaagccaattttgccatacttgtttgtgcattcttaagagtttagtacttaagcatagaaaactgtggggttcacatttatattttgctttattacaacttagaaggtaattgatgacttggctctgtggtatgctcaaagtgctggactgagctagttcaagaatgtcattagcagtgaatgggaaatatgtgtctacttttcttcagtagctaaacagaagtaattatatatttacattctacctatttcatagggatgttgttagaattactgtgattagatttttttttttaatttccaaatgtatttaagcttctttacagataggtgccatatcaaagcaaggtgttaatgtcatttttctcaatttgtgtttttgtcactagaaatatatatatattgctttttctcttttcctggtatatttttctgataaatgttttgaaatttgttatcttaagtttttcatagctggaatgctagaaaagcatttatgtcctatttttagtgcaagtgatgagtctggctgggtgggtaagttaatggcaaggtaattgaactgtgctgagtgctcgccgatgtatccttctggcctctccattttcagggtagagttactgtttacagtgacatgtttcacagtctgtgtgaccagccagtgtgaatcagttcgtctattgcctggctttcttgagctcaatttttgtctcatttcccctttccattttatatatcacatttcaagatggatgatctacttgtctaaccactccagggaagattggtgccatctaataaagtcaaaatgaggtcctgcatgttacctggcataaattagagaattatagaatgaatgtgtgaacagatctgagactagagctaggtcacgaaactcctcagtttttttgggttctcattatgtgtttatggatggaattgttctctttatctggtttgggtggttttgtttgtcagtggccaatgtggtggatatttcaacacaatttggacatgcttcctatatattttgcagaatggtctttttcttttggttaactttataactaatagttaaagaattttcaagcctcagctgggtacggtggcccatgcctgtaatcccagcactttgggaggccaaggtgggcagattacctgaggtcaggagttttgagaccagcctggccaaaatggtgaaaccctgtctttactaaaaatacaaaaattagtcaggcctcactccagcctgggtgacagagcgagactctgtctcaaaagaaaaaaaaaaaaattatttgggcttggtgacgtgcacctgtaatctcagctactcgggaggctgtggcacgagaattgcttgaacctgtgaggcagaggttgcagtgagccaagatcgtgccattgcacttcagcctgggcaacaagagcagaactccatcttaaaaaaaaaaaaaaaaaaaaaaaaaaaaaagaattttcaagccacattaggatgcttatcggcatgagttttacataataagacaatctgaaatgtatttgagttttgatgtttctaatctgtagaacttgaaggcctaaggattttgtagttttttagggaacagcattcctctttctctcaggtgatctatgttatgttgacctactcaaacatgttaactttgaaaatgaaccaacgttcaggaacaaatgaaatgacattttcaggacagcattccaaatacatagttagggacagttgttcgtagcttctggagtgtttgaaaatggccctcatatcatacaacttgaattggcattcattgacaatcactttgcttttaaaagatgcttaacaaagagttgtaagtaacatactttgagactgagtaaataaaataaacatgcgaacctttgatgttaagctgagtttgtttgatttttcaggctgaatatacaaagactgtttctaggaaaacttgtgctttgtacagatagaggaacctcctaagaattttgattgtggcttccaaaatagcagatttctagaatatgattacctactttatctaagatttcaaaaagctgctttgtctattttatgatataaagttttcaaaaaatcatcactgttttgtttgccttttttttttttcttgaaaaggcatgtgtttaagcatcagccttattagctggactgttatttcatgtatttctgttagaacgctggataatggacttgaaacttacatggctaatataataccatgaagtttaggaaactaagggctcatttctgttgtattccttggaacgtatgtgggttcaagatcaaaatcattatttcttctttgttttggtatttgtctctttcgggaattaaaatttgttcccaaacattcgtaggactacactgtagcaggaatctgaatagaaaacactccttgtttagttctgagtttatgtggatgaggactaagtgaccattgaaggtggaagggtgatcacagagattactcagaacttaatttattaattctaaaatgcgttcattgaatacacatggtttgtgtgctttttatgggccaaaccatgtaacagaggctgggaatgcagttcttgctctcaggggaatgtagtcttgtctgagaaacagacaatgaacatcagtttccaatagatctagttgtaggcttagagcatgcagagggaacaacagaaaaaatccactgagaccattctggggtccaaataggacccatggcccaagtttagaatggcaagaaagaggaaagacagagggagcttgggcagtgttctgcaaaggataaattcagttctctaagaatagttcactagtccttttttttttctttttttttttgagatggagtttcgctcctgtcacccaggctggagtgcagtggtgcagtggtgcagtggcacgatctcggtgcactgcaccctctgcctcccaggttcaagcaattctcctgtcttagcctcctgagtcactggaattacaagcacgcccggctaattttggtatttttagtagagatggggtttcaccgtcttggctaggctggtcttgaacacctgacctcaggtgatccacccacctcggcctcccaaagtgctgggattacaggcatgagccattgtgcctggcctggtcacttgctcatagttattaatctgaagaagttctacagtaaatcaaatgttcaggattgcctaatgttgacttactgatttagaatatcattctcttggtatgcttctataaactaccagtgctcaatttttcttttcaattttgaacttgttgatggacagtgtctacagtctcttgacagttatgtaatttgtgtctatttaggtttaagctgtcaccttcccaaatgcggcatctgtgtagccccagagggagcattctaaaaggtaaatctgagcctggcgcagtggcccaggcctgtaatcccagcactttttgggagctgaggtgggaggatcacttgagtccaggagttttagaccagcctggtagcaagaccctgtctctacaaaaaataacaataaataaaattaacaggcacagtgatgtatacctctagtcctagctaccgtagaggctaacatgggaggattgcttgcactcaggagttcgaggctacagtgagctatgatcgcaccactgtactccagcctggtagcaagggcctatctctaaagaataaaaaatagactaggcatggtggctcatgcctgtaatgctagcactcggggaggctgaggccggtggatcacctgaggtcaggagttcaagaccaacctggccaacatagtgaaaccctgtctctactgaaaatacaaaagttagccgggcatggtggcgcacgcctgtaatcccagctactcaggaggctgaggcaggagaatcgcttgaaatcgggaggtggaggttgcagtgagctgagattgcaccactgcattccagcatgggcgacagaccaagactctgtctcaaaaaaaaaaaaaaataattaaaaaaaaaaataaggccgggtgcagtggctcacacttgtaatcctagcactttgggaggccaaggcaggcgaatcacttgaggtcaggagtttgagaccagcctggccaacatagtgaaacctcatctctaccaaaaatactagcctggcgtggtggtgcatgcctgtagtcccagctattcaggaggctgaggcaggagaattgcttgaacctgggaggtggaggttgtagtgagccaagatcacacttctgcattccagcctgggtgatagagcaagactctgtctcaaaaagaattaaaaataaatgaacaaaaataagccaggcgtggcccggtgcagtggctcaccctgtaatcccagcactttgggaggctgaggcaggaggatcacgaggtcaggagatcgagaccatcctggctaacatggtgaaaccccgtctctactaaaaaatagaaaaaagtagccggtcatggtggcgggtgcctgtagtcccagctactcgagaggctgaggcaggagaatggcgtgaacccgggaggcagagcttgcagtgagccaagatcgcaccactgcactccagcctgggcaacagagcgagactccgtttcaaaaaaaaaaaattagccaggcatggtggtggatgcctgtaatcttagctactggggaagttgaggcaggagaatgacttgcactggggaggtggaggttgcagtgagctgagattgcaccattgcactccagcctgggcaacagagcaaggctctgcctcagaaaaaaaaaagtgtatatatatatatacatatatatatatatatatatatatgtatatatatatatatatatatatgtaaaagttaaaaaaaaaaaaaaaaagacccatttctgccgaaaatctttcagtgactccatcaccccaatgggccatgggcaagtcctgtttccactctcacatccttgcctttgggattgttttcattcctgctgagtatttaccctcacctggaaagcagctgtgtgaacttctcttcatccttcgtaggctggtggcctttcttccatgctcagttaatcagtttctcttctctgcttcctttgttctttggcctgctctgcggtgttgtatgaaacacactgtgccagaattgtttgtttactttctgttcctgttctaaatatgagctctttgaggcaggacctgtgtctttctttggacctttacgtttgtcgcagtaactgtcatataataaacagtcaatacttgatttaagctgagcaatgtaacacttaaacattaattttgttacatttactggattataatggtgactgaaaaaaacatttttaagttttttactccacctgggacaattctaactaagtgttttacttatgttaaaactcatttaattatctttgttaaagaattactctgatgcttgttaaaatagttaggaagactttattcaagactattgcaatggcggggagagatccagctcaattctgaatccagcaaggacaaatagagaattacagtcaagtagcagaatatggtcagtgaatggtaaattgctaagtggagacatcaaggtcagtagatcttataaaactggcttagtctgcttgggctactgtaacaaactactatagactagatgccttaagcaatcgaaatttatttcttatagttctggaggctaagtctcagatcaagatgccgacagatttagttcctggtgagggccctctttgtggtgtgcagacagtcaccttcctgctggcagaaggagagatcatctctctgatgtctgttcttataagggtaccaatcccattcatgaaggctccactctcatgattttaattacctcccaaaggctcgctttccaaataccatgaccttggggataagtgcttcagtgtatgtattttgagaggacacatttggtccatggcactgacctaacaagattgttgccgaaggcaggcctagaatgtatacatcaaaggtgggggtgaggaatttgatcaaatatcaaaggtgatcagatatctcagatgggggtgattctcactaaactgacttagcaggattgtttgtaaaactgagttaggtaggctgaagacaggaggggactggaggaggttgcggcttcgttgaggagggctcagagaagcctgagtttggtcaaggagagggtctttgtcactgttaggagccttttaacttaggtgctaattatactagcattttatagacaaagaatctgaagcttagaaagaggctaagcaactcacgaggtccgtaccagtaagcaccctacctggattctagctggcgtgctttctgttccataactttaaagcattgatcatctggaccctgcctgtgatggctcaatttgcttttgctaacctgctgtgagaatcagtgggagtttgcctctgctttaaaattactcatggtcttgctgcccttagtgctgtcaatcctgtgatttccactggagcaacatactcaggttacaacactgggtaacatttacattttagcagctttcttgaaatttaaaatatatgtgtaagtatctcatttatatgcatttctagtttctttatacaacagaataacttcttttacatcaaatttctgaatttgactaaatttagaaataatggaatctcatccattaaatatagtcatagaaggaaggaaatatgaaaattaggatttcagatgtttgaacataaaagataattttaaacattgtcagtaatctatttctttttttttttcgagacggagttttgctctgtcacccaggctggagtgcagtggcacgatcttggcttactgcaccctctgcctcccagttcaagtgattctcctgcctcaacctcctgagtagctgggattacaggggcatgccaacatgccgggctaatttttgcatgccaccatgccaggctgatttttgtatttgtagtggaaatggggtttcgccatattggccaggctggtcttgaactcctgacctcatgtgatccgcccacctcgcctcccgaagtgctgggattataggcatgagccaccgcgcccagcccagtaaaatctatttctatgaaaagctcttcaaatgtaggtgaacgctgtaagctttatgaatcaactgttttctaaatggtaatacatgaaatctgacaattttttatgtgattttattcaattttctaagaaaagtaaaaaatcagatacatagccgctcttctcttgggactagtcttgataccttttgtatttttatatagtgctttgctcatacccttcttgctgttttttgttttgttttgttttgttttgttttttttggtgggggggtgggggatggagttttactcttattgtccaggctggagtgcaatggtgtgatctcggctcactgcaacctccgcctcccaggttcgagcaattctcctgcctcagccttgcaagtagctgggattataggcatgcgccatcacactttgctaattttggtatttttagtggggacagggtttcactatgttggtcaggctggtcttgaactcctgacctcaggtgatctaccctcctcgacctcccacagtgctgggactacaggcgtgagccactgtacccagccccttcttgctatgttttagcctgcaatgctgttcccacttgtgtctatatagcactcctaatttaaatcatacacactgctattctgcagtgatttcttactctttcagtcagggttggtagcttttttctctgggctttcacagtcctgtggaagggcacagggttatcttatctgatacaatgtgtacgaaaggagtaactgtatcatagtaaaagttttatatataagtgaaaatatttacaacactttatccagcttacaagtttttgatatattttgtttctgtgtcttaaacacaatggacaaatacctcatataaagttttatatttttaattgtcatatatttcattatatggatatatcttttttggagacagagtcttgctcttttgctcaggctggagtgcaatagcacgatcgtagctcactgcagcctccaattcctgggctcaagcgatccttccacctcagcctcccaagtagctggaactacaggcatgtgctcccatacctagctaatgttttggtcttatttttgttacttatttatttatttttaaacactttgttgcttaggctagtgtcaaactcctgggctcaaggaatcctcccaaactttggctacccaaagtgctgggattacagatgtgaaccaccatgcctggctggatgtttcataatttacctaactgttcctatgctattgaacagttaagattatttaagtttttaattgttaaaaataaagtcatggtgaatgcctttggacatatatctttgtattttggattattttcttatggcagatttgcaggagttttgttattgggtaaaatggaaagaacatttttcctttattttttaagagaaagggtctggccaggcgctgtggctcacacctgtaatcccagcactttgggaggccgaggcgggcagatcacctgaggtcaggagttcaaaaccagcctggccaacatggcgaaaccccgtctctactaaaaatacaaaaattagccaggcgtggtggtgggtgcctgtaatcccagcgacttgggaggctgacaggagaattacttgaacctgggaggcggagattgcagtgagccgatatcacaccactgcactccagcctgggagacagagcaagagtgtctcaaaaaaaacaaaaaacaaaaaacagacagggtctttcactcaggctgcaatgcagtggtgcaatcatggttctctgcagcctccaactcctaggctccatcaatcctgcctgagcagttcctaggactgcaggtgcgtgccatcatgcccagctgatttctgtatttgttttttttatttgtagagatgaggtcttaccatctttcccagctggtctcagacttctggcctcaagcagtcctcctgccttggcctcccaaaatgctgggattacaggcgtgagccaccgtgcccggccacttttttctactcttgatatacttacctatgatacgctttccaaaggagttgtaacagtttgccctcccaccagtggtgtgagagagggtctctttgctctaacagtattaatatcagatatctgtattaaacttatttattttgaggccttacctctttccttgtggtaaactttctgaactaggttgacctaaagtaaactggtttagattcccaaataaaattgacaaaaactttataagatccattttaaaagttggagtgtcaaggaaataggaaaagctttgttagagagggaaatgttattcagtgaagtacatattgaatgtgtgaacttttcttcagtaacagttgttatcttttaaaaatcttctccatggtatttggaattttaaagcttaatacctctgctggattttgcaagcgtgaaactaaaacacagtgaaatttgaatgtgcaaacatacataaactggaattgtgaataaattagattataaaccaaacacattttgagtataagtgggcctttagaaagttttttatattatgggtagaaggtgaacctttctaaagaaaataagaaattgaggaaatctaggattttcttctttttattttggatctcagtgtgtttgtgatttttaacagaaacgttcttttctgtactttaatggtgcagccagatccatgtaaagaaaaggagtgaaatccccaggaaagatgaccagcagcaggattcttttcagcttttctccctttcctcaggcttgaatatatttcagtgcacctcaatcaagtgaagtgagattaaatatttgagtcatctgtctgttgccttctaaaatggtctggctttctgttggctgcagtctatttagtgttttagtgatgctaatgttattgaatggtttttagttctaaaacttctagtagtgataaatcttgtgcatagaagtcccctaggtcacttagcagagcgcagttggtttttgttaatgactgcattgtcctttgctctcattcgtgatacccagtgacttttcattgatgttgcagtaaggctttttttttgttgttggacttctcccattctttacacattggtaaataatcttcagctgtagcaggaggtagccagcatctatgtgtggatcagatttatcaatatgtacctgtgcagattgcctttatctcctgattgggcaaatacttaacagtccttagcagtctctccattgagttttccaccaactctaactggcaaaaggactcagttgtattggacaggaaaatcttattgtctttgctgtccattgtggcactaaagctgtgaagatgtcatacatgtgaagtattcactggattctcagttacttactcgttatcaaggcttacatgtagccaatttaattttgatgaatatgtttaaatgtagggcattttataattactggctcatggttttttatacagtatgtgcatatttcatttcttttactaccgtctttcagcccatatttaattcatccatttgcagctgttgcactgttttgttgaaactggcttaaaaatctggcaggaggcttccctactttcttgcccttttcggtgttatggtgttattttacacagttagtactttctatgtagtttcttctttcctaaagctgaagggccatatctctcaaacttttctctgcttacctttaaccactgttcgtgccgatgagctgataataccaggcttggttgctggctgtatttagaggtatacaatttaaatacccagagataaaggtgacagtagtaaattagtgcactgtattgtcttaagactaagtgtgatttcagttcttatgctacaacatggaagtttattttaatgttttcctttatgtatgggctttgcaatggttgaaacttgagtttttatttggaagttttggaagacaacttttagattgtctcttttttttttttttgagacggattctcactctgtcgcccaagttggagtgcagaggcgtgatctcggctcactgcaacctctagctcccgagttgaagcgattctcctgcctcagcctcccgaggcatacacgaccacacctggctaatttttttttttttttttttgtatttttagtagagatgggctttcaccatattggcccggctggtctcaaactcctaacctcaggtgatctgcctgcctcggtttcccaaagcactgagattacaggtgtgagccactgtgcctagcctagattatctcttctttagtgactgtatatatctacattacacagatgacaacattttgttttcctgtaacctaggccattacatttttttttcatgtgacaaagtgtttgcaattatttgtgaaattttaattttttcatcacttattaatttatatttgagaggactggaaagtatgtgagttgaaaatagtttaaacttatacaatctcattattaatttggctgttaatttgaatctattccataacttatatttaaaataaaattttgatttgaaaggctcttatctcaatcagtggttcttaaaattattgtttgctgtttagagttatattttttttccaggaagtacttttttagctttcaggaacttgatataatgttttattcttgatgacccactggaaaatagaaccttctagaagaaataaagtcactttattgaagctttatgaatggctctcctatctgcatctgtagggctctacaatctgatttttccaaacaaatagacaaactatggataataacttttcagatgttactttgcagttagttggtggtctggaagaagaaaaaagagcttcaaagaggggactgttaattccatttatctcttgaacaggaattgctttcctgtctttcattgctgtcccttatttttcacctttatgttgtagctaggttttggttttattagctccctgatgaattctctcttcctgccaatattaaagtaaggatgatttagaagaactgaggttaaaatctgcctattgaagctctccaggctagataccctgacatttctctttgtggaaagtaagcaggagtaaagggacaaatcgtccgaaatgccattgagtgttgccaagtgatgtgctgacagctgtacctgacagtgattgctggaccctggtcattcctgagtgtctccttttcacctcccatcccctgctgccactcccccctaacaacaacagaaattctgggaggaatgcctgttccctatttagaggacaacttgagtgatcatgatagtttgtcagatataatgtggacaatgacctttttcagttttagtaataagattcttctttttatcaggttctttatcctttatgcagttttaaaatattacttatgaacaagctgcatatcccttttaggtcatcttgttcttctacttcaaatagcacatgtagaagccacatttgaggctcagggcttcagacatgacaatagggcattgatcaggttggctatatgtttgggatttgtcagttcctttgtccattttttgtctcgctttcagtaccttttctctgtgttttaaaagggctttgtgtacctcttgcctttatgtgtaatcttacagggcagctttcttctttttcattcatttcctgctctaagagtcatctcaagataggaatctggtataagactcacttatagaacagggacataggctcttccagttgttttcattcattgcagattattttaaataagagaaaggtttccttgtatttttctttaatgttttccaattttgaattgttatagatgcaaagcctttaaaaggataatatgtggaggcagtatttgtttggggtatcttttaattgtttttctagatcaaggacagatatagatagattaatacctgaaacgaaaccctaacaactctcaaatatcagataatttttttttatgtttctgaggatgtttttatatcctttgagatatttaaaatatacacatttttatgtttctcccacatttggacatttctttcccctcaatgtttcattgatgccacatttctaccaattttaatcttgtattctatatcttactatcctatagtttcttcaagctgaaattagaccttttgagcaactttaaaacaaatttttaaaaatatttatttataaaagatcaattacacttattaccttagtaccataataaaaatctgtttcaaataaatgagtctgaagatgggaagggacaccattcagtgggtttagaaatagacctgttaaaatacaagtccagctggctgggcacggtgcctcatgcactttgggaggctgaggcgggcagattgcttgtgctcaggagttcaggaccaggctgggcaacatggtgaaaccctgtctctacaaaaatacaaaaattagccaggtgtggtggtacacacctatagtcccagctacttgggagactgaggtaggaggatggcttaagccctggatgtggaggttgtggtgaactgagattgtgccactgctttccagcctgggtgacagagccaggtcctatctcaaaaaattatagaataaataaataagcaagcccaaaggcaatttcattttattttatttagagacagtgtctgactgccgcccaggctgcagtgccagtggtgccatcatagctcactacaacctcgaactcctgggacaaaagcattttttcctgcctcagcctccccaagtagctgggattgtaggcatgtaccacacacccaatttttaagtttgttttttgtagagacagcatcttgctatgttgcccaggctggtcttgaattcctggcctcaagagatcctcctgcctcagcttcccaaagtgctaggagtatcggtgtgagccacctgccctgcttgaattgttttttttttgttgttgttttgtttttttttggagacggagtcttgttctctgttgcccaggctggagtgcagtggcacgatctcagctcactgcaacctaaacctccttgggttcaagcaattctcctgcctcagcctcccgagtagctgggattgcaggtgcccaccaccatgcctggcttatttttgtatttttagtagagatggcattttgccatgttggccaggctggtctcgaactcctaacctcaggtgatccacctgcctcggcttcccaaagtgctgggattacaggtgtgagccaccgcacttggccctgaattgtttaaatatgaagatgaagaggtctctgctgtccttactcctctggcctctaataccttctagccatcttgccttactttggaagggagggagacagatgtagttgttcacagttgagagctgctgaaacactgtgactttatggacagtagtagggagaaagcaagcctaatccgtttataaatgttccattatatacaaaataccctttctaccaacagtaggttcttaattactgacaccaggcatgctttggttgtgactccagcagcgcgggttggtggcatcttacactgaacagcctgggcctccactctccccttctgtaaattttgcctgtcactaattgtttgggcccagtttcttcatttatataagaggattataagatttttgtgaggggatggtcaataattaagtgaaaaacagatgatgtatgttcataatcaccttttagtctctaggtcattaagcctagattagcctattttggtgtattagaaatttgctgattatctggactatgtattagtagtacatgtagaagatttcttttttctgtgtgtgtgtgtgtgtgtgtgtgtgtgtgtgtgtgtgttttcttatagatgtggtctcactctgtttcccaggctgaagtgcagtggtgcaatctcagctcatgcaatgccaccaatccatgttgctggagtcacaaccaaagcatgcctggtctcagtagttaagaacctactgttggtagaaagggtattttgtatataatggaacatttataaatggattaggcttgcttaggcctgggttcaagcaatccttccgccctagactcctaagtaattggaactataggcacatgccaccacgcccagctagtttttgtgtattttttgtagagacggggttttgccacgtcacccagaacagccttgaactcctgtgactgttgtgggaaattgatctagactcaagtgatctccctgcttcggcctccaaaagtgctgggattacaggtgtgagccactgtgcctggcctgtaaatatgtttgaattacctcatttcatcttgcatgcttgttatttttaacatgccttttctccctttaatttttaaaaaatttggctgggcatggtgacgcacgcctgtaatcccagcactttgagaggcataggtgggtggatcacttgaagccaggagtttgagaccaacctggccaacatggtgaaaccctgtgtctgttaaaaaaaaaaaaaaattagccaagtgtggtggcacgcacctgtaatcccagctatttgggaggctgaggcaggagaatcacttgaacccaggaggcggaggctgcagtgagcagagattgtgccactgcactccagcctgagtaacagagcgagactccatctcaaaaaaaaaaaggccggaatcctagcactttgggaggctgaggtgggcggattgcctgagctcaggagttccagaccagcctggtcaacatgatgaaaccccgtctctactaaaaatagaaaaattagctgggcgtggtggtgggtgcctataatcccagctactggagaggctgaggcaggagaagtgcttgaacctggagggcggatgttgcaatgagccaagattgcaccacttcactccagcctgggcgaaagagcgaaactctctctcaaaaaacaaaaaaacaaacaaaaaaatttttttttttttttttttttttttttttttttttttttttagacggagtcttgctccgttgctcaggctggagtgcagtggcactatctcaggtcactgcagcctccgcctcccaggttcaagcgattcccctgcactcagcctcctaagtagctgggattacaggtgctcaccaccacacccagctaatttttatatttttagtagagatggggttttgccatgttggccaggctggtctcgaacacctgacctcaggcgatctgcccacctcggactcccaaagtgctgggtttacaggcgtgagccaccgcacctggccaaaaaaatttgaaaattttcaaacattcaggaaagttgaaagaacagcacaatgacatacttgttttaaaagaccaattacagtttaattatttgatataaagttaagttttaaattatgccagtaattaatactttagacattttattccacatggttaaattttacctttttaactattcaacttagtatttatgtgctagaacctaaaatccctaattgtttatgttttgttttgatttttattttttggaattgttgcatattttctgaataatcttcccatgtttatgatagcaaaacattggaactgaaataacaaatctgtttcaatatacttttttatcatgcaaaatgacattttaataaatattgttttagccaggcacggtggctcacgcctgtaatcctagcactttgggaggctgaggcgggcagatcacctgaggtcaggagttcaggaccagcctggccaacatggtgaaaccctgtctctaccaaagtacaaaaattagccgggcatgatggccggtgcctgtaattccagctactcgggaggctgagatggaaaaatcgcttgaacttgggagatggtggttgcagtgattgcagtgagccgagatcgcaccactgcactccagcctgggtggctgagcgagactctgtctgtgtgtgtgtgtgtgtgtgtgtgtgtgtgtatacacatatatacgtatatataaattgtatatatataaagaaagaatatatatataaagaatatatatgcgtatatatataaagaaataaagttgttttaaggatggtcattctagtttataaatacatgtttattagaggccttctacttatctatatcaacattagggattttaatgtaagtgccaaaattaaggatcatcagtattttttcttttgactttctgtaattggctcttttttcctgaagctgaaatgaagaaagattaaagacttcttaaacatattctagctttggtttaaaaatctgaacattatccaaacttgaagaaactatttacctgtttcttcattgcttaatacttagtctctatgtttttctattttttgtacctaaataaggagtgtttgtctcaataaaatatctaggtccagcaatatgtttagaaaggttttaataacttgctgaaagcatgcattttgtgtaaagtgtggcaaagaaggaaacaattgtactttcactgggaaaagactaaaaggaaatataaataccaagctgttgatagaggttgccttcggagagtggaattgtggatttttttttcacctatcttttcagttttctaaatttcccacaattgtcacctataacctttaaagggggaaagtgtaagcaatcatgatgtaggccctgttgtaaaacagaagtaaatgggactgtgcctatttgcctacttggtgctgcccttttccgtgtgttgtctcctcgccgaagagctccgggcccttagccctgaggtgctgcctctgcttggggctgagcttcctgcactcctgggtaactctcctgctttctaggccacagggccagggacctcagagagaagaatgcctttccttttctctaggtatgtttctgtttgttttcagcgtaggtgacctaccttatgctgctgaagtcccctcatagagatagaactgatttcgttcacttttttcttttcttaactgctctaggctttctgttagattttcaaaaaatgtgtgacttcctgcttacatatggtaaatgtttacacgtcaggaagcttttcctttttgtgtgtaagaagtagaagctcactggacttatatgtcagcattctattaatcttaattcccccattttgtttctgtgatctgctatgacattacaaaaaaaattggtttatctttcttctttcgttttccagtgcctttattgcatggaacagtatcccctgcacccacgcttcaccctggttagtttaccaggctaactactttgtgcctctttggtgaagttcgtattcctaaaagtatgaggttatcatcatgggctctgaatccagactctctcttccattgtttaataactgtataaactgtgttttagtctctggaagagggaatactaataatatttagtccatagctttgttaataggattaaattggctaatataggtcaggtgtacttgcaagcacttaaactttccattcgttattataagctattactattaaggatcatgccagtaaatcctcaccaaaattgacttcattattttggcataatgttattgtagactattatctttgattccgggagtaaggctaagttgtcatttgaatgagataaggacctcgaaatcagttgtaaagacaatcttggccgggcgcggtggctcacacctgtaatcccagcactttgggaggccagggtgggcagatcacgaggtcaggagattgagaccatcctggctaacatggagaaacccatctctactaaaaaaaaaaaaaaaaaaaaaaaatacaaacaaaaacattagccaggcgtggtggcaggtgcctgtagtcccagctacttgggaggctgaggccggagaatggcgtgaacctgggaggcagaggttgcagtgagccgagatcgggccactgcactccagcctgggcaacagagcaagactccgtctcaaaaaaaaaaaaaaaaaaagacaaaatgttttaatgaggagataaaaatcactgaaccagcctgttgtttttatattggatcagtatagctttgtaccgtacctggaaataaaaataaaaatttttcctgagtaaattaataagatgtaggaaagatattaaggtttatttttaagtaagctctaaatagaaatgataatctgattataaaaagaagaatatgaaaaatatttaatatgctagtgctctgactcaaaaattaaaacctacattttttctttattatttgttttttgagacagagtctcgctctatcacccaggctggagtgcagtggcacgatctcagctcactgcaagctctgcctcctgggttcacaccattctcctgcctcagcttcccgagtagctgcgactacaggtgcctgccaccacacccggctaatttttttttttgtatttttagtagagacagggtttcactgtgttagccaggatagtcttgatctcctgacctcatgatccgcccgcctcagcctcccaaagtgctgggattacaggcgtgagccactgcacctggctaaaacctacatttttttcaattctctttttaacatttgaaaattttgcttaatctaaaatatactccagaagtttaaatggaaagaccttaataaaatattcagtcaaatgctcttcctttagaaatggaggtactgaagttcatttctcctatcattctaaattgatgtttcattttgactatatatttagtgagttatggcagtaaaagcagctttaattttttttctgaaagcctactcatattggagccctttataacttgcctcttgaagtatatatatttattcatacaaatcaaacactgatgtctgtgaagtttcatatcatcttttatatttgaattttgttcatatacttattgtcacccaggctggaagtacagtggtgtaatctcagctcactgcaacctctgcctcctgggttcaagtgattctcctgcctcagcctcccgagtagctgggattacaggcatgtgccaccatgctggctaatttttctatttttagtagagatggggtttcgccatgttggccaggctggtctggaactcctgacctcaagtgatctgcccacctcagcctcccaaagtgctgggattacaggcatgagccaccaagtttttaattgatggcattttaaagaatacctcatattttatactttccagacattttccccacttatatgaaatttaaaatgagagtatagctgttatttgttacttggtcataaaggtatttggaaaagcactgatcttagaattttaataaaaggcatttattaccaaaaaaaaaaaaacactggatatattgaccttaaaatgagtaattagtattttccagtaaagcattttggattcaacatagactatgcttcaccctacctcacttctattagaaaaccttttttaaaaagaaattttctttttgtcagctttagtaaataatgtcattcaggattcctattcacaatctgagatctgccacttaacttgctcagaagccttacagtccacaccatttgttctatcctttcaattcaggttttatttgtttatttatttatttattttttttggcgtgctgttgcacaatcttggctcactgcaacctctgccttctgggttcaagtgattctcctgcctcagcctcccgagtagctaaggttacaggcgtgcgctatcacgcccagctaatttttgtatttttagtagagatggggtttcaccatgttagccaggctggtgttgaactcctgacctcaagtgatccacccgcctcggcctcccaaagtgctgggattacaggtgtgagccactgcacctggcctcaattcagtttttaacttgagcttaaacgagatattttttaaaagttaaaatctgtgttgaggcatatcaagaattgctatgtctcttgggggagagatgtgaattccatcaacatagatatgctagtttatagtgaactgttaggaatgctgtacccttgactcatacttagtcttttctttgtggcttgtggctctcttttcaacttcattaacatgtaattgaagtgtactaaatgcatatacttattttttatgttttttcaattttttattttttgtgtgtgttggggggtctcactatgttgcccaggctagtcttgaactcctggcctaaagtgatgctcccaccttggcatcccaaagcactttacagatgtgaggcactgcactttaaatgtgtatatttaaaaatgtacagtttggttagttttgacatgagcatatgcctgtgaaatcatcattcccaagagagcaaacacttctgttcccccaaaaggttcttgtgcctctctgttttgtgtcctttcttctcctcccatcttcaggaaaccactgatggggtttttgtcactataattagtttacattttctagaatttttctggaagtggaatcatagatatatacttcttttttaatctgacttctttcacttagcataataattttgagattcacgcatgttgttgcctgtgtaacagttggttactttttattgccaagtagcatttcattggatggatagatcatcatttgtttattcattgatcagttgattgacatttgggtttcagtttttggctcttaaaaataaagcttgatagtacatttgtatagaaatctttgtgtgggcataaattttcatttctcttaaccaaatacctagaagtagagtggctaggtggagtggtagctgtgtaatgttttaagaaaactatatttttaaaagtttgtacaattttacattcctctcagcagtgtgtagagctgttccacatcctcaccaacactagatgtggtcattctttctcatattagccattctagtggaaatatagtggcatatcagtgtgattttagtttgcatttccctgatgattaataatgttgaacatcttttcatgggtttattgcccatttctagaagttattttacatctcagccatttcctcactgagctgtcttattcttaaattgtaagagttctttagatattgtggatacaagtactttttctaatgtatgtgttgcaagtaagtgttttctttgtggtttgcttttttgttttcataagggttatcttttgaagaactgtttttttgttttttttattactttgaagcccagtttactaattttttcttttttgtttttttttgagatggagttttgctcttgttgcccaggctggagtgcaatggcgcgatctcggctcacagcaacttcgcctcccaggttcaggccattctcctgcctcagcctccagagtagctaggattacaggcatgcgccaccacgcccggctaattttgtatttttagtagagacgggtttctccatgttggtcaggctggtctggaactccggacctcaggtgatccacccgccttggcctcccaaagtgctgggattataggcgtgagccaccgcacccggcctaattttttcttttataaatcatgcttccttgtgttttgagaaattgcctagcctaagttcaggaagatattctcccatcttttaagatttttatatgaagcatatatggttttgcatttaggcctaggacccgttttgaattaatttttgtgtattatgtaaagtgtcagtgttggcttttctccccacctggatatccagttgatccactttgtttgttgaaagacttttttcctccagtgatttgtctttacaactttgccaaaaatcagttaaccaaacgggtaggtctttctgaactcttcttttctgttttattgatctgtctctttacaccaatcccaaaaggccttgactactgttgttttatagtaaatcttgaaatcagggtaaatctttcaactttgttcttttaaaaagttgctctgcttattctaggtctttactatcagcttgccgatttctgccacaaagcctgctgcaattttgattgggattgcattgaatatacaaaccctttggaaagaatggcattttcacagtatttaatctttcaacccatgaacttagtatcttagtaccatttatttaggtcttctttaagttttcttcgcaatattttgtagttctaagtgtagaggccttgtatatgtttttttgtgtgtttgtttgagacggagtttcactcttgttgcccaggctgggcctcccgggttcaagcgattttcatgcctcagcctcccaagtagctggaattacgggcatgtgccaccatgcctggctgattttgtatttttagtggtcaggctggtctcgaactcctgtcctcaggtgactcacccgccttggcttcccaaagtgctgaggttacaggcgtgaggcaccgcgcccagcctgtcttttgttaaatttacatttagaaattttacatattttgatgctactgtaaaacagttgtttttcttaattccactttccaattttttgcttgctagtatttaagaattcagttcattttaatacattaaccttttatcctgcagttttgttaaattcacttattgaatatagttattgttttctagattctctgggattttctatataaatagtgatatctgtaaataaggagagctttatttttactttccaatcttcatgcctattttttgcttgttgtttttcttgtcttattactttattgagtaatctccatatcagtgttgcacagaagtggtaaaagcagatatccttgtcttcttcctgatctcaggctgagaaattcagtctttaaccgttaactgtgatgttagatgtaggttgttcatggatcccctatatctgtttgtagaagtttcctactaattctaatttgctgagaggcatttttttttgtttttttttttttttgagacagagtctcgctttgtcacccgggctggagtgcagtggcatgatctcggctcactgcaagctctgcctcccgggttcacgccattctcctgcctcagcttcccgagtagctgggactgcaggcaccggccaccacgcctggctaattttttgtatttttaggagagacggggtttcaccgtgttagccaggatggtctcgacctcctgacctcgtgaaccgcccgtcccaaagtgctgggattacaggcgtgagccaccacacccggcctggttttttttaatcatgattggatgttgcgtttttgtcagaagcttttaaaaaaatatctgttcacatgatcatatgggctttctgctttattctgctaatatagtatattacattttctgaatggtttaatcttgccatttctaggataaactatttggttatattttagtatcctttttatataatattgatgttcaatttttaatttttgtgaatgatttttgtatctgtattctttagggatcttgttctattattttttgtaacgtctgtgaggttttggtattatagttgtatgacctaaaaaagtgaagtgggtagtgatctcctttttttttgtttgtaaaacttttcataatttttgtattatttcttctttgaaagaattcaccagtgaaacagactatggctttcttttgggggaagttttttgttttttttttttttcttttgagacggagtcttgctccgtcgccaggctggagtgcagtgctgcgatctcggctcactgcaacctccgcctcttgggttcaagtgattctcctgcctcagcctcctgagcagctgggactacaggcgcgtgctaccacacccagctaattattgtatttttagtagagacgttggccaggatggtctcgatctcctgacctcgtgatcccaaagtgctgggattacaggcatgagccaccgcgcctggccggggaaggtttttaatgataaaatcagcttctttaataaatataagagtattcacattctcgtatcaattttagtaagctttattttccaagaaatttgtttcttttatctacactgtcaaatttattggcataaggctttttactatttcttattttttaaatgtttgtaggattgatggggatgccccttatttctacgatttttttttctctctgtatctagctcgaggtttgtaaattttttttttcaaagaaccaaagtttgattttgtaattttctctattgtctgcatttttattcatcctgccatatcactgtaatttcctttcttctacttactgttggtttacatttctttttccaagtttttttctgttattgtttagattactaacatttaatgtaattatcggttgttggaattagacctgccatcttcctattactggttttgtttgtcctttctgtttttttttctttctttcttctgtttcttttttcttgacatctttggatttttaacattccattttcatttgcctcttgactttttggctatgtctttttctgtgtgttgtgtgtgtgtgtgtgtgtgtgtgtgtgtgtgtgtgtgttgtgtaattgctccaggtagtaaatatatttacttaaccttttattatcagcttagagttaatattttatcacttcacatagaatgtagaaggcttgcagccataaaagtccctttaccctccccccagagacatttatgttacagttgtcatatgtgttatatttatgttgaaaccctactacacagtgttacagtatttgctttcaacagtctacatattttaaagaccctaataggaaaaataaatttatatttactcagatgtttgccatttcttttgctctgctttcattcttaaagatctcagcttctctctaaaattttcatttgattctttttaaactagtttttctttctctgctgataacttgtatctttccatgcatttgtgtttgtgtttgcctcatggaaagtaggtgtaatggctgttctacagtctttgtgtgataatctcaacattttcattgtcttggagttggcatctgttgattgcaattttttttttttaagaatttgtcagattttcctacttctttgtatgtccagtagttttggattatatcctggacattgtgagtttcatgttgtatagatgttgtgtgctgttgtaatcctctgcagaatgctgtttgtttcagtaggtatctaacttggttagatctgccttggttatataccagactataaattctctatgctgtctgtggacaggggttcctttctcagttcagttttcaagaccagtgagtgctgtgcttctttgagcctgccgtgcatatccatatctcaggtgtgagcctaagacaagcgggagttaattcacacaatggcaggtcccatttctaccttctttcctctctggttttccccacactttacagcccacaggtgcctttttcattagttcctttaaccacaaagaccgtgtttctgttggagttttagtctctgcacctgtgcttcactgcatagctccctgactggggcccacctgtggggcagagttgtagagaaaagacaaaaaagaaagtttttactccatggaaaggaaactttttagaaactttttactcacctcccaaatctgcctgcttttgtctacttcttattgtcctcaagtattatagttacattttgtgttctgtctgctatagcagaagcagaactctggtttgtgacattttattttatttttatttttgagactgagtcttgctcttgctgcccaggctggagtgctgtggcaggatctcggttcactgtaacctctgcctcctgggttcaagcgattcttgagcctcaccctcctgagtagctgggattacgagtgcccaccaccacgcccatctaatttttgtatttttattagagacagggttttatcatgttggccaggctggtcacgaactcctgacctcaagtgatccgcctgccttggcctcgcaaagtgctgggattccaggtgggagccaccgtgcctgaccaggttttgtgacattatttaatgtgttggatatgtgattattctttttcaacatggtagcctttttttgtttttgtttttgagacggagtcttgctccgtctcccaggctggagtgcggtggcacgatctaggctcactgcaagctctgcctcccaggttcacgccattctcctgcctcagcctcccgagtagctgggactacaggcgcccgccaccacgcctggctaattttttttggtatttttagtagagacggggtttcaccatgttagccaggatggtctcaatctgctgacctcatgatctgcttgcctcggcctcccagagtgctgggattacaggcgtgagcaccactcccggtctcaacatggtagccttttacaaattactatatttttttcaaattgtagtaattcatacagcaagcatatataatggtaggacaaaacaccttaagccaagatgtcatctccatggtctgtccaggtagcatagaacacaaaaggagatgtgattgaaagatgttgcttcatctacatgtttctactattgtctggggttccttaggagccaaggagaacctcgctgtgattggcattggaaagacctgtggttggaagaaaattacctgggaacattccagcctcatcttttttttttttttttttttttttgagacggagtcttgctctgtcacccaagctggagtgcagtggcgctatctcggctcactgcaacctccggctctcgggttcaagcaattctcctgcctcagcctcctgagtagctgggactacaggcatgtgccaccacaccgggctaattttttgtttggtggagacggggttttaccgtgttagccaggatggtctccatctcttgacctcgtgatccacccgccttggcctcccaaagtgctggaattacaggcgtgagccaccgcccctggcccagcctcatctttaagccataatttggctattgtgttagtgaataaacctgaaaggtacatcttcattcatacataaacataatttagttttcattaggtagattccttgttcacatccagctgagaacatgacactaaagaaatcgggctttaattggggagggaaagagagagaacgtggagtccctttggttgtcacttaagagatacagatgaaggagaagtagagttggaggtcagaagggccagaaggtaaatgtagtctaatattagtcatagtgaggtgaaggcttttggagggtagagattcacctagggtgagaattatttcctaagttctagagtagcatggtaaataacaaatagtcttaggtgctttgtcaggaactgataatgactacaagtatatttgaaatcataagagttatatttatgtttgctgtgatcctctcatagtagctgtgaaatatttaaagtaaggcataaaattattatatctatatctatatctataagtaaaaatggtctattttaatgccttcagtatcatagttgagtattaagctaatgctaacttcataaaatcattttttcctaagataatttttgagatttataggaaggtagaaatgcatgcatttcctctggatttgccatttgttgcatagtattatgtataacattttcttaaacaaaaagcttaaagaaaatattagcaaatcaaacctagctgtgtagtgaaagaataacatgcatatatgaattggtctattgtacaaattctaggataattcagtatttgcaaatatgtcactataattcagaatgtaagtaaaggagaaattcattatctcactagatgcttaaagaaagcttctgaaaaaaatttagccatttcttaataaaattataaaaaataggaatagaaggaaactacataaatatggtaaataatctttactaaaatacaacaacaaaccaacctattaaaatatgaaataccaaaactgtcactgtgaaagtcacaggcaatacaaaaattattgctatcacaactattttgtatagcttagtattattgctttgggctagtaatgtaaggctaaattctttatttccagaaaatataggtctaggaaatctaaagagattcatatgtgagactattagcactaataagaaagtatggtaaagtagctggatacaaagaagagaaatcaataacctctttattttgcaacacagtaaaaaaatggaagtaaaactgaatgaacagaatgtattctcatatatattaaatatctgttttactatgcatttaaaatccagagcttaccatttttgggaaactctacaaaaagatatatgacatgttgattccaaaaggattttatgaggactaagtgagataaaacacactaaaatgttcaagagaattatcaaggttgcctatacaatatattgaatgagaaattgtcgaggaaaagaaaggcagctgcaatttctaaagggaatctacagtgagaagtagtctgattcacaaacctctggttaaatatggtgtcttgactacacttgttttctccttccctaaagtctgcaataatctcaaaggaagcttaaaaatgttaattcatagctgggcagatggggtgttgtcacctgtaatcccagctacttcggaggcagaggcaggagaattgcttgaacccaggaggtggaggttgcagtgagccaagattgcaccactgcactccagcctggggacggagtgagactctgtctcaataaataaataaaataataaaatacataaataagtgaaatcttaattcataaggagaaacataacagtaaaggagacagtgaccaaagattttaacaatttttcaaaacagaaagtgaatggagggagtagtaactgagttcacagagaaagataccacctaagtacctgcagaggtcagttatggagataacagcatgccccagggatatcttgagagagttccttgtgcttgggggctccacgtattccaaaaggctgaagtcagttttacagctcacagtggaaattccttaaaagtccatatccagatctcttagaccttcctctcctacactccagcagatgggtaactacttcagtcccgtctgctggggaaatgggaggagcgctagaaccggaagtgctccagactagagaggtgaagcacgggattgaaagtcaagtgagcctgtacaggtctgcacactgaagtgtagggccctacctccttccttcttcactcctcctcaaggcagcacttagatgagttgatcccttcacaccccacccagcagttcgttctacctggcaaaacttaacagcttcggtgaagaaacctccacattactgaacatttggaggtgtcccaatgaaaaggtaactcaatatacctgatcattttacagagaagcccatcagtcaacaagcttgccacccacgctgagcttgggcagttttttagtgcctcattattaaatatggaggcgcatccagggaccactagatatacaaggaaaaccttaaaagtgaaagagacgaccgagacaggcggatcacaaggtcaggagttcgagaccagcctggccaacatggtgaaactccatctctactaaaaatacaaaaattagccgggcatggtggggcgagcctgtaatcccagctactcaggaggctgaggcaagagaattgcttgaacctgggaggcagaggttgcagtgagctgagatcgcctgggcaacaaagcaagactccgtctcaaaaaaaaaaaaaagtgaaagagacccagtcaatgagccaatgaacaaaaaaggaacccagaggaatccaatgatccaagaaacagaagaacagagaacaagaaagtgcttttggaaatttaaaaatgtgatagttggaaaaaacttctgtggacaaattggaagatgaaattgagatgtattagggcaagagactcattttttttaatttaaatttaagattttaaatctgtgagtatttagtactcattctttttttttttttaatttttgtttttgagacagggtctctctccagttgctcaggctggagtacagtgacaccgtcttagctcactgtagccttgacctcccgagctcaggttattctgccacctcagcctcctgagtagctgggactacaggctcatgcaaccacgcctggctaatttttgtatttttactagaaacagggttttgccatgttgcccaggctgatcttgaactcttggactcaagtgatctgcccgactcagcctctcaaagtgctgggattacaggtgtgagccactgtgcccagtcaatactcatttttaactgtgcatttaccctgttaaattaaacgtaaggaaaaatattcactaaatctggatttttttgagacggagtctggctaagtcacccaggctggagtgcaggggtgcaatctcggctcactgcaagctccatctcctgggttcacgccattctcctgcctcagcctcccgagtagctgggactacaggcgcccgccaccacgcccagctaattttttttgtgtgtgtgtgtgtttccagtagagatggggttttaccgtgttagctaggatggtctcgatctcctgaccttgtgatccgcccgccttggcctcccaaagttctgggattacaggcgtgagccactgcgcccggccctaaatctggatttttgtttttagttagagaagaggactggctttttttcacatcggctgttgatgaataaataatgcctgatggagatttttggagcattagatttgtgtttggtagtctgggacagatgttagtgtaatatgcattgtttacaggatatggagttagcaggacagctaactccacagcgtttggtcaccaaacgaatgatatcgtgctaatcacgtaccctttctgattttcatttacctgatccataatatggggatggtaataatggtaacctatctcacagggctgtgatgatgagtagaagagataagacctataataaattacctagtataatgtgtagcatgtactaaatgctcaatgaaaagaagctttgattataaccatcaagtagatggactggtaattatagatggttaagaaaaaggtacagtcagccctccgtatccatgggtttcacagagtccataggttcagcctaccatagattgaaaacatttgggggaagaaattatgtctatactaaacatgtacagacttttaagcttacagaataacagttgtttacatagcatttaccttgtattaaatattgtaagtaatctagagattatttgaagtatgcaagaggacgtgcttaggttatatgcaaatactgtgccattttatatcagggacttgaggatccacggatttttttttaatccatgggaggtcttggaaccagtgttcctgggataatgagggacaactgtatacttaaaaagtaacacgtgaatgaatgaattccttaattgtagagctatgctctggctctagtattagtcctctgaccattaaagatagcatgttggtgtgtttatgattatacaggaattaagttttcataaacttaaatgttgcattttcacttacaggcgtcgattagcaaggtaaaagtaacagaaccatggctcagtttccaacaccttttggtggtaagttttcagaaatttctctttttaatgtactttgggaccagattttaaaaacttgatattatggcaaatttaaaattaaaaagtagagaaaataatataatcagcattcatgtattccatcatatagtttcattaattatcaactcatgcccaatattgtttcatctggattcttttggagcaactcccaggcatcatttcatctataaatattttagtatgtgtacctaaaagataagaaaacgtttaaagacataacttcagtaccattatcacatctataaaaatttacaataccgggccgggcatggtggctcacgcctgtaatcccagcactttgggaggccgaggctggtggatcacctgaggtctggagttcaagaccagcctggccaacatagtgaaaccctgtctctatgaaaaatacaaaaattagccgggcgtggtggcaggcacctgtagtcccagctacttgggaggctgaggcaggagaatgacatgaacccgggaggcggaggttgcagtgagccgaggtcgcaccactgcactccagcctgggcgacagagcaagactccatctctaaataaacaaacaaacaaacaataccatattattgtacctgtaaaatgttcgctacatctagtctgtaccttatagtctttggacatttccctgatagtctttagacatttcttgttatggtttgtttgtttaaattgggatccaaataagatacaaacattgcaattaggtcatgtgtttcccaagtctcttagtgaattttcccccactcctctgtttttttatcagcaagttatttgttgaagtgatggggtcatttacactttttcaaagcctggatttgaagcatgacatttttgtttgttttacttcagttaaactaaacataagtttgaaacatatcagtctgcataaaatgtgttttttgggtaatttttcctaatgttattaggaaattgttaagtgttcttgcttacacccaagttactttttaacaaaaatacttattaaaaagtacttattaaaaaatacttattaaaagttcatattaacggattactcttggaagctgtctaatcttgtcatgaagagagtaaaagtctccgtgggattctggtacagagatctgtaaacttttaaaaatcactagttattctattttatttttgtcccccttcttaattactgtacaatttctggtttttgtttatagttacagggatgaattctgacagggcagtgaaaatttcttctagaagttgcagaactgtaaggcctgtgaggaaggggtcatttctgtcttggacacccgttcatccccacagtaaatatttttccagtgactgaatggatttttactttatctgtcagtgtcatcccagacccggtagagaggagagatgcaatgtttagatgtttttgctggtgtgctgggcacattcacattttgtgtgaaacatacgtattgtgtattcccagttttgtggaaggtgtccgagcttttgaaagctttcatgtatgtaatctagaattattttagtcaatttgaggagacctaggactaaagtctgcaagatctcagtcgtgagtggacatctagtcagcctaagagctgaaactgaaggaaaacctaaaacccattctctttggctattatttcatatcaggacatcccctgcccttctttttttttaagtctgtttcctgcatactgagatacctgtttttaaaaacagctttagtgaaatataatttatattccataaaatttactagctttagttgtataataatttttagcaaattatatagagttgtgcagccatcaccacaatctaatatattaatattttaatcaccccccaaaagattttcatggatatttatcacactcaccttcttctttcataacttttgcctgtggcatttaaggcacttgagagtacagttttaggtttaagttaatttagtctgttgcttgggtttatgtaagtaaattattaatttactataatcttgctaactatgggattataaaacaagtttctaaaaaaggaatgtgtgcctcttcttttctttccctcccattctctctctttctgtttcttacattttgtgtcctgttttacacttttctaactttatatgcataacttccaaggacaagaagatgtgaatttatcaagtctttataatacattgacagaatcttgaagtgctgtggaaatagtgtgtgagagcattttgttttccttttctcactgaataatttgtttgtcttttctttggattttaggcagcctggatatctgggccataactgtagaggaaagagcgaagcatgatcagcagttccatagtttaaagccaatatctggattcattactggtaatcacagtcagcattttttcatttttacttatcagtagtgcagatgtctgtggaaactctatcatgcaaagacgagatgggcaaatatgaccaaggagagacatttacctgttttgccctaaccttgtgcctgtccttttacaatttttttacacataatggaatcataccttgtttgcaatttttagtgcatgtcaaaccacttgttttgtgcatgtaatttatgggaattggttaagatcaaaggaccaatggctcacacctgtaatcccagcactctgggaggccgaggtgggcagatcccttgaggtcaggagttccaaaccagcctggccaacatggtgaaaccccgtctctactaaaaataaaaaattagctgggtgtcgtggtgggcgcctgtaatcccagctacttggaggctgaggcaggagaattgtttgaaccctagaggcagaggttgcagtgagccgagatcacgccactgcactccagcctgggtgacagagcgagactccatctcaaaaataaacaaactaattttcctgtttgattatttttcagaattcactttataaaaagtggaatctttatttccaggggaattgttctgctaccatgcccagctaattttttcttcttctttttttttttgagacagaatttcgctcttgttacccaggctggagtacaatggcgtgatctcggctcactgcaacctccccttccagtttcaaacgattctcctgcctcagcctccgaagtagctgggattacaggcacccactaccatgcccagcttattttttatatttttagtagagatggggcttcaccatgttggccaggctggtcttgaacttctgacctcaggtgtcgttcttaatcattgttatttattctctgtaaatacttcagaagtacccagaatttggagtataggtattgggaatggcaaataactttttttataaagtgaaagtatgggtcatcagtttcctaaggatttctataaatgtgcttttgcacaatgggtagctgttcatatcttagttaatagcagattaattaaagtggaaaatctatgccaggaaatggtaggccctttttgagatgattttttgaattctaaagtcagtgctgatggattcttttactgttgcctatgggcttatccttggacttttataatgcactcaactggtatttatagtattaccagcctctttgtaaattttgtaattttgctattacaggatttctgtcagctgttgtttttttttttttttcctgaaactttttctgtttaatttacaggtgatcaagctagaaactttttttttcaatctgggttacctcaacctgttttagcacagatatggtaagttggaattttacatgaaattttacataagcataaggcaaaataaaatatcgttttgttctatttggtaatatgatttcttatgttataaaaggagaacatgtatctctagcctgaaatatcttgttacttcttaccagagagttatgtctgaaaagtgtctttctcatatggaactaaaacaaaacaacaaaaaaagtggtgacatttgaatgacaacactgtcaaaaagttgaatttccatggagacatctaaattttggtgttccttcaccaattagttttggcttcacccatatcacccacatttatttgaatgtcccacatttcttgctttataatggaatgattttttatctttcattgactgaagaataaaaggtaaagaaaatatttgagagttagtgcatggtaaatccataacattaatagataatagtgaattatttgactatcacaaataggcattcaatcttttaagccacaggaaatacagagagtataataaaaagggtggcaaatacagttttggattcttggctcatggctttggagagccatgctgaattctgttgtcctctaagatgtctcatttttttcaccaagggtgcttaatacttcacttccctgagttaattagtgatacgaaggcagctcgctatgaagaaagagcatgtaggctgggcgcggtggctcatgcctgtaatcccagcactttgggaggccgaggcgggcggatcacgaggtcaggagatggagaccatcctggataacacggtgaaaccccatctctcctaaaaatacaaaaaattagccaggtgtggtggcgggcgcctgtagtcccagctactcgggaggctgaggcaggagaatgatgtgaacccaggaggcagagcttgcagtgagccgagatcatgccactgcactccagcctgggcgacagagcgagactccgtctccaaaaaaaaaagagcatgtgatttgtagtcgtacacctgagtttgattcccaggtgtaccattttcagtgtctctgatttggagatacagttaccctctttgacctcaagttttctaatctagaaaataggaatggttatagttttgtgagagttgttgagaggattccagaaaaaccaaggacttattgtggctcctgtcacataataggccctcaaagtaaaacccaaaaaggtatcatctccaggggctgggtattctacataactgaattttccagctaactactttgtcctcttaaattaccaaacttttaaatttataatcttgtggaaattaataaaggttgatacagctttttgtttcttttaagcacagtctacagaacacaatctaagcttttcttgatgaaatgtcatcattatgaaaattagtaactgtcctgaaatagcaaaactttcacaggagattgtgtgtgtgtgtttgtgtgtgtgtgtgtgtgtatttggatatatttgaattgaaacgaaatgataccagatctctgtgctttttttgggtatctgctttattttctttttcctggttgtcagcatattggccgccagactgtctctaaactagtgtgcttgctcctctgaagccattctaattctaacttctgatctattagagctaaaaaatcagataaccaagcggttttggaattacagtttaagtaaagtaagatgctcagatgaagaaacagcctgcaagaaagaagtcatgtgcaagtgagcacagaagccctgttctgtcagttaaatgtgaaagtttaaacgcaagagacctgtggcacctttgtgaattttaacaagcttctgctttgcagctcatacatgatcatgtctcataccatcaggacctctcgctggaaccttcttccgcagacttaacttcctccactggattatgcttttgtgttatattcccaatttttcaaagttcatttattctttcaacattgaaaaattatttatcagatatctcctgtgggccagggactgttaagaggtgctgcggatatagcaatgaacaaaatagacagaatccattcttttactgaaacggcagtctagtggagggagacaataacaacacaaaaattgtcacatggtggtaagtgtggtggagaaaaataaaatacactctaatgaatttcattttttttcttctgttttttgtaaaggtgggatcttgctatgttgtccatgctggtctcgaactcctggactcaggccatcttcctgcctttgcctcccaaagtgctgggattataggtgtggccaccatgcctggcaaagacaactgtcttaattgaaaaaagtgacatttggctgggtgtggtggcccacgtctgtaatctcaatgctttgggaggccaaggtgggagcatcgcttgcgcccaggagtttgagaccaacctgggcaatataatgagccctcatctttaaaaaaaaaaaaaaaattttttttttttgtttttttttttttttttttgagatggagttttgcccttgttgtccaggctggattgcaatggcacgatcttagctcactgcaacctctgcctcccggcttcaagcgattctcctgcctcagcctcctgagtagctgggattacaggcgtacaccaccacgcctggctgattttggtatttttagtagagatgggatttcaccatgttggtcatgctggtctcaaactcctgaccttgtgatccacctgcctcgacctcccaaagtgctgggattacaggcgtgagtcactgtgcccggccaaaaaaattttttttaattagctgggcattgtggtgcatgcctgtagtcttagctgctagggaggctgaagtgggaggattgcttgagccctggagtttgaggctgcagtcagctatgattgtgccttctagcgtgggtgacagagcaagaccctgtctctaaaaaataaaaacagttgtcctaactttctaaactatttttacctgagtggcccaaagtcaggtttttataatgactatgtatattaattaaagatggtaatgtggcaatcttagattgaatgaatctttaatttttttcttacgttttgctaaataaatttgtgatggcgtattttactatcaaaaatgtctgtaactctcttttcccaaaagaaatgtctttgaaaagtcattggaaatttcatgaaccactgatatcctgcccagatgatggaataatgcagtgcaaattatgagtttagcaagatctgcctttcaactgagctgatttgatacttattcacatagtaaccctgagtagtacttgatctcttaaagcctaggtttttttgtttgtttgtttgtgtttatgttttgagacggagtcttgctctgttgctcaggctggagtgcaatggcacgatcttagctcactgcaacctctgcctcccaggttcaagtgattctcctgcctcagcctcccaagtagctgagattacaggtgcccacgaccatgcccgcctaacctttgtatttttagtagagacaggttttcaccatgttggctagcctggtctcgaactcctgacctgaagtgatctgcctgcctcggcctcccaaagtgctagaattacaggcatgacccactgcagccggccaagcctaggtttttaaaattgcaactaataatagctgatctaaagaagcagctccctccaacccccatactatttttatgttcttctgtgatttttctggtagggtcccagggtaagtccttactccttttggtagacggaagaatgggtttgactctgaagttttaggcagtccttgtgtcagtcatctggggaagaagataattttttgcttttttgtttgtttttgagacagggtcttactctgtcaccaagactggagtgcagtggcatgatcatagctcactgcagcctcaatattctgggctcaaacaatcctccggactcaaacaatcctcccacctcagcctcctgagtagctgagtctacaggcatacaccaccatgcctggctaatttttgtattttatgtagagatggggttttgtcatgttgcccaggctggtcttgaactcctagattcaagccgtctgcccgcctcagcctcccaaagtgctgggattataggcattagccatcacatccagcaaagaagagaagtttggattaagaattggaaactgtgtctagtttctctctctgagctttacttactttgttctggactttgtttcaaatatttgagtgatacgaactgatggacagtatatgttagaaacctttattatgttttatttccatgtagaaactatattccagttaactaatttgttaactttcaactgtaatctgttaatgctttggggactccttgtctctcctggctgatttccaattaagaatacaagaaaaccttaattctcggaggatggagtcaagtcagtgtgtgtcatgccaaattataaccgtggccaaagatggtacatcttcctagaaattgtcttattaataaggagctggaaggaggttggcagatatccttttggcaattgaagtgcttagaattttttcaactttgctatgatgtggaggggaggagaataaagcagtgggaatagacaagagccagaaggtacaggaaggaagaagagacggggtgaagaggctggatgagggctctggaatctgagacggagggccagcagaaatggagagaaaagagggagtgagggagcactacctggaaatgggccctgagaggaaagaagggagccagacacatgaaggcaaggattagatcaactttgtgatctggttcagaatgggtgtcagggcaaacagccatatagtcatagtttgtactttcttaagacactcctgagtatgtgtcagaagggccttcagccccaacaagatcaatttgctaaactcatacaaaaaaaaaaaaaaaaaagaataagcaccctggactcttgatcccctctcctccatccctcattcctgagtctttaccatccagtagctcatggcgttgaactaagatgacatcttagttacctggctgcccaaaccaacacctgggcaccgtgcttgatttccctcttttcttcaccctgcatacccagtccatcaacgtaattgcatttacggactttatccccaatctggccacttctttcctactgctaccatcctaacctgtcatctcacctgggcccactgttcgagcatctggactgggttctctctttcacacttgcccctttagagtctagtctccaaacagcagctggaattttttttttttttttttgagacaaagtctcactctgtcgcccaagctgggcagtggcgcaatctgggctcactgcaacctctgtctcccgggtctaagtgattcttctgcatcagcaccttgactaactgggattacaggtgcacactaccatgcctggctaatttttgtatttttagtagagacggggtttcaccatgtcagccaggctgggctcgaactcctgacctcagatgatccacctgcctcggcctctcaaagtgctgggattataggcatgagccaccgcacccggccaggaataatcttttgaggagtgcagtggtgcgatctcagctcactgcaacctctgcctcacagcttcaagtgattctcctgcctcagcctcccgagtagctgggactacaggcgcgcgccactatgcccagctaatttttgtatttttagtagcagggtttcaccatgttgggcaggatggtctggatctcctgacattgtgatccgcctgcctcggcctcccaaagtgctgggattacaggcttgagccaccctgcccagccttcttcctgttctttaaatgggccaggtttctccttgcctcagggtcattgtacttagtgtttcctcttcctataattcagttgctctagttcctcacatcgcaggttcattgcctttcaggtttcagttcatatgtcacctccccaaagtggcattccctgaccagctagtgtaaagtggtcccctctgcccacctctttccctttaccttggtagcacttatcaccatgtaaaataatctggtttgttctcttgttagttctgcttgcactaaaatataagctctgtggtgctaggaactgtgtctttttcatagatataaccccaatttccagatagatgcccagccccccactcccccctgccccataattggtttttgaatgaatgagaatgaatgactggattagtctgcactgctgctgggtctcacctccagcccaaggggcagcaggtgagagatgagcagcctgaggccaggctttgtggatgaactgggctcctaaaggaatctgtaggtgccaacactgcagggaatgaggtgggacaagaggagcctggcctcatcccttcatcctgtaacacacacaaagtagtttcagaattgttacattcacctccactacaaacaacaaatttaggcccagtgcagtggctcatgcctgtaatctcagcactttgggaggtcgaggcaggaggatcacttgagcccaggagtttgagacctgcctgggcaacatagtgagaccccgtctctactttaaaaaaaaaattatccaggtatggtggcacatgcctgtagtctcagctactcagaggatggggtgggaggatcacttgagctgaggattcaagcctgcattgcgctatgattgtgccactgtactccagcctgggcaacagagtgagaccctgtctcaaacaaacaaacaaataaaaaaaaaaaaaagaacctagtaagtagtgtaaaccaaaaagtatctgagacaagaggtctcaatcattttaggagtttattttgctaaagttaaggacatgccgggaggaaataagcacagaatcacagaaactgtgcttttctccaacgatgattttgatggcttcagtatttaaagggaacaggtaggctggagggcaaagagggaggatatggtaatccatatattgccagagaaaaggagcaggcaggggaatagtcagttaggtaatagtaaatcagtaaagtgctcagtaagtcggcactttacataagataaaatggaacataaagtagcctgtagaggtgtttgaccttttatttgtagctccctgcttaggaacaaagggactcagctttcagggactcagctttcagcttacttttctaccttttgcatagtgaattgaagtcctgcgtttttattttcctttcacagtagatttcaagattactttgtagttccttttgtttttaaacagaggacatataaagtactatgtgaagttacttggactaggcttttttttctacctcttacgtggatatgttagttatttataatatgattaggtttattttcatttttatttaatttagatatgcctcctcatctttgtggacttaattttattatttaaatacataacagattaaaaaggttctaaaaaccgaaactaacaaaaaggtgtgctcagacaaggtcactccctcttctatccctttaccctgtttccacccattgtattagtttcctgttatccttcatttatttttgttggaaaaaagcaggtacataatgtatataacgtgtatgtattcatatttaaattacttcctttcctccttacattaaggtaacctgctataaatgctctctgttcttttttttttttttttttttttttttttctggagacagagtcttgctctgtcacccaggctggagtgcagtgacgtgatctcggctcactgcaacctccatctcctaggtttaagcaactctctgcctcagcctcctgagtagctgggattacaggcacgtgccaccatgcccagctaattttttgtatttttagtagagatggggtttcaccatcttggccaggctggtcttgaactcctgacctcatgatccacccttctcggcctcccaaagtgctgggattacaggcgtgagccaccgtgcccagcctgtttttttgtttttgtttttgtttgagatggagtcttgctccgtcacccaggctggaggtgctatcttaggtcactgcaacctccgtctcccaggttcaagcaattctcatgcctcagtctcccaaatagctgggactacaggcgcccgcgtgcccagccaatttttgtgtttttagtagagacagggtttcaccttgttggtcagactggtctcgaactcctgacctcaggtgatccacctgcctcggcctcccaaagtgctgggattagaggcatgagccaccgcgcccagccgtaactaccatatttccataaatttcttagaattttcattaccagggattccccacagttatgtttattgagaaaagcgttttttgagtatcacgacattttcaactaaatgttgggattgtcgtatgtggtttaaagtcaagtccctagaacctcatggttaagtttcttctcctcacccatgaaaacacttctgtaggacacctttagagtctaattaagccattacctaaagtcttctcccctaacctactcattatcccacactggatattcctgtttctcaccagagaccatactgggcagtggtgtggggaacagggagtgggcacctgcctgactgattgattggttttagtgtgcatgttgatgttgatttttattaatgggaactcttccccaccaaaccgttttaaatagttgcgtatcttttaaaaaactacttagcaaaagaaggaagttcaccatttcattttatttacttagtttcctttataaaacctgaaaggtagtacaaaaataaagcaaccagaagccagtttcatttatgagcatagatccaaaaaagtcaaaatcttagcaaatagaatttcacaatgtatgaaaagaatacacaatgaccaactttatgccagaggtgcaagattggttcagagtcgaaaaattctatcaacattagtcattatttcagcagataaaaggaagaagaaaacttgtgatcggattggtaattacagattaggcacccgatgaaaaatacagtaaccatttctaataagtagaaaggaaactacttaaatatgtgagactactatccatgaaaagagtcaaactctgtaaaatatttgaaaaggtttattccaagccgaatatgagtcaccaatggcctgtgacacagccctcaggagatcctgagaccatttgcccaaggtggttggtatataacatggttttatacattttagggagacataagacatcaatcaatatatgtaaaatgtacactatttcggtctggaacaatgggacaactggaagcagaggcttccaggtcatacgtggattcaagagtttttaattggcatttcattgaaagagttattatccaaagagctggaatcaatagaagggaatgtgtgggttatcataagtggttttggagaacaaagttttgtcatgcgggtgaagcctcccggtagtagacttcagagaaaatagatggtaaatatttcttatcagactttaagagcctcctttatcagtcttaaggcctgtgttgatgctaatgctggtcagctgggcctgaattccaaaagggaggagggtataatgaggcatgtctgacttcctcttcccatcttggcttgaactagtttttcaggttaattttgaaatgcccttggctgagatgaggggtccattcagatggtggggggctcaaaattttgttttcagtttacattactttccagaaatcactaccaactgtcattctaaacaatgaactctattaaactattagctctagtaaatctactgtttcatttaaactcagaactgagcaagaacgcattcagtaatgtcttagaaggcagtaagaccaataaaaaagattggcctaaatattggaaaagaaagataatgctcatttttttctagttatgtgattgtatacttagtacacccaagagattttagttttaaaacattaataagaacttgtaggagtctggtaggatagctaaatacagcctaaataattttttaaaataaaaaatgttctctgtgcttgaaataagcacctaaaaatggaaatggggggaatgtttcatctaaaatctggcaaaaatgataaaattcttcagaatacatttagcaagaaaagcatattatatgaaaaaagtgatacaattttattaaaggaaatagtatatttgaacaaccggaaagattgtcttttctttggttgggtaaactattggtgcaaaagcaattgtggtttaatcaattctccaaaaatccccttctaaggcagtttttggatcccagtagggttgtttgtataacagataaaataatctaaatgttcataggaaaatagacacccatgaataaccaagggggaaaaaaaaccttcccagaccttcccggatcacaatataccagagagccagtgtgatcaaatcattgtaatattgacctggaaattgttcagtcagaacagatagtccagaaatagttctcacttcatatgaacatttgatacatgataaaaatgtatattagttcagtgagaagaagagggattgattaataaatattactgggaaagctaggaatccatgtagaagaaatgtgattggaccctggaataactcccccacccctacccataattattggtttaaggattgaaatgaaataaaataatacaatgttagaaaatcaaggactaacaaccttctaatcatatgataaaagaaatattttatatacaaaaatttagaatttttatgccgtacatatacataaatcaacaaataatgaatttttaaaagtctttcagcagtcagcagataaacagttaatttgtgatacactatgagctcttataaactaacaacaaaagacatgcaatatatagaaaatttggcaaaggatttgaataagcagttcatagaagtgcaaatccaaatggccacgaaatacagaaaaatgatgctcaggttcacaagtagtgagaagaattcagattctgaattctttgctgaagggcccatgactacaggagaatggggaactcctatctgaggcaaaaaggtttctgcaaccacagagctttgtttcctgcgttatgatccttattttctaaaatgtgccaacttttacaatcttgatcacttttagagatttttttatctttgtcttatgccatactttttattgtgttacatgttttctttctttgagttaattccagctatgcagaattgttttctgtgtaacttaattttcttttgtgaacactgtccggatatggctcagtctaaaagatcatggtattttaattgaactgtcttatttagatctttcaaatacatttttcataatattggtttaaaaaaatcctcatgcttttaatatctggattaaaagaaataaaatctgaataaaacttttttatgcagaagaggttaagtcatgaatatgcacagttttgatgatataatgtagtttccagttacaaggacaaacttttgcttacttgatcttagccaaaaggccgagaagcgattccttttgcttactcttctttgagaaaatactttacattaaagctcattacagtttgcacttggaccgtgtatatttgagtaccattttcaaatagcagacacattttgtaagctaacttacaaaattgttgagtgatatggggcatgattctaaagaaaagttagtttcaagagctttagaggtttagtagcattatagttgagtaaccctagcatagcataagtaggtagcatagcatactgtgtcatgttcccacattgaggtttgtagagctctacaaagaatgcaatctaagtatctctagcaatattaacattccgcttctaaatctttttcttttctaatagctttattgtgaaagaattcacataataaaatttactcgtttaaagtatctaattcattggttttagtttattcacagagttgtgcgacagtcactattagctaattttagaatgttttcatcacttcagaaagaaaccccttttgatgtctaaagtacaaatcctcacactgaggctgaaaattacctgctaaagtggcagagtgaaagatattttatgtttatataaaacttggccagtatttacaggctattccccatagtttggtaaacagttatgttttctgttgttgtctctaggggtaagagtgctaattattttgttttcgtgttggtgggagtggtggttttggaaaggttcttttatggtcacagttgttctcaggccatgctgttggtttgcagggcactagctgacatgaataatgatggaagaatggatcaagtggagttttccatagctatgaaacttatcaaactgaagctacaaggatatcagctaccctctgcacttccccctgtcatgaaacagcaaccagttgctatttctagcgcaccagcatttggtaagtctgaaaatgaattggtttctgtattttcttgtatattttaaaaataaatgttttcctttttttccctctcggtttataacattatgaaattctaggaggtaattctgtctgaaaaatgatggccccctgcaggaagatagtgctggggagaagaaggagcatgttcacatttgaaccctgggatgtaaagtaatcaaaatgaaagcagagatgcaggccgccagtcaggggaaaaggaagaaacttacagtccgctgctgcagcttctgggtttttttttttttttctcttccattatccttcaggttgttgcatacttccttttgattttcggtttccataatgtctgtttctccttgtgcataaacaattcctttggattatggcatctagaaatatatatattttgaatcacagtactgagtcacttggccacattaaattctttcttagaacaaaatggaatagagaaaaaataaacattgttatcctgattaaaaacctaattccagccgggcatggtggcttacacctctaatcccagcactttgggaggctgaggcaggtggatcacctgaggtcaggagttcgagaccagcctggtcaacatggcgaaatcccatctctactgaaaatataaaaaattagccaggtgtggtggtgcgcacctgtaatcccagctactcggagaggctgaggcaggagaacctgggaggcagtggctgcagtgagccaaaattgtgccactgtactccagcctgtgcgacagagcaagacttcgtctcaaaacaaacgtgattccataaaaaattatctttcaaccaggtatttttcttataagctaattgattaattagttgactgagatcagtagttctgatttctgttctcattctagactttaggttaatttgaagatcacagtaataaaatctaacatctgattcatggggaggttctttaacagtttaaaacaaaacatgaaaattgtggctagagtttcttttcatctcttcatcctcagatagctgatgataggtgataaagtgaaatagatttcggagggggcagtcaacagtaattcagggtgtctctgatataattaatgataagctaagatacagaaatactctggttttacttactaggtttcctattaaaaacaatgtattgcctttcttttagtaagttttagccacaaggctggtttttgtaaggggaaaggttttggaagatttttaggcaaataggatagtggtccaagaaaagaaagaaaaatccatatatgagcaaaggcgaggaagagcagaagtgaacactgcagcagcctccacatgactggggccgttgtttgtcttgtccagtgtgtgctcacaatgtttagcctttagttaaccagctaatttaagtggaacttgctctgaatccctgaagatctctgtagccaatctttggtcaggacccaggcgttaaaataattcaagggtgtttggggtcgaacacagtggctcatgcctgtaatcctaatgctttgggaggccaaagcaggaggattgcttggtcccaggtgttggagaccagcctggcaacataacaaggcctcgttgctactgaaaatttaaaaattaaccaggcatagtggtgggtgcctatagtcccagccacttgggaagctgagacaagaggatcacttgagcacaagaggtcaagcctgcagtgagccaagatcacactactgcaccccagcctgggtgacaaagtgataccctgtcttaaaaaacaaaaacaaaaaacaacggtatttggttttcttttggctttcttccaatgctacaagaagaaatctcatagtggagaaaaggtcaaatgactagaggcaccccatttctcctttttctctcaaacctggggtcaataatttttcctgtaccatttaattcattttctcttattccattctgccatcagaatttcagttgtggagctattgctgatttagtttcaggaggttgtgaccttactgctgagaaagttttacagtcgttaagtaacctgctactgttaaacctgccaggatttctgacctaatactctgccaggcagcccatcactcttccccccagacttctccctgtctttcctcaccacattgatgttctcagtaaatgattttgatgaggctaaaccatgaaggatatcagaacataggagaagttaccagtatatgatcttgatcaagtttacttaagtattttctagttctacctctcagctcaatctagggtaaaatacatatatatattttatagtttgttgagccacttgagaataaaataatttattactattgtcattgttttatttatttatttatttattttgagacagactctcacttagtcgcccaggctggagtgcagtagcatgatcttggctcactgcaacctctgcctcccgggttcaagcagttctcctgtctcagcctcccgagtagctgggactacagggacatgccgcaacacccagctaatttttgtatttttaatagagacagggttccaccatgttggtcacgctggtcttgaattcctgacctcaggtgatccacccacctcagcctcccaaagtgttggcattacaggatgagccactgcacctggcctgctttctaattaatattgaaaattattggttaggtgtggtggctcatacctgtaatctcagcactttgggaggccgaggtgggcagatcgcttgcgctcaggagtttgagaccaacctgggaaacatggcaaaaccccatctctacaaaaaatacaaaaattagctgggtatggtggtgtgtgcctgtagtcctaactgcttgggaggctgaggcaaggggatggcttgagcccaggaggtggaggttgcagtgagccaagggagatcgtgccactgcactccagcctgggtgacagagccagaccctatctcaaaaaacaaaacaaaacaaaaatctgactctgcatttccttgcccttatatatagtatgtgccttcacatataatatttgatcacaatgataaccctaaaaagtatgcagactgtattagccctgttatataaatgagggaactgagattctcagaaattgaacattttgcttaaggccatatttctaacaaaggagatagaacctgtccaaagctaccatttatctaaaggcgagatggagtctcactctgtcgcccaggctggagtgcagtggcatgatctcggctcactgcaacctccgcctctcgagttcaagcaattctccttcgtcagcctcccgagtagctgggattacaggcacccaccaccacacccggctaatttttctatttttagtagcgacggggtttcaccatcttggccaggctggtcttgaactcctgaccttgtgatccacccgcctcggcctcccaaactcctggcattacaggcatgagccaccgcacccggatggctttaggttttttaaaattaccttctccgtgccttcattatcaccaaactaactgggtgacatgacgtgtcactcttccatggttccttgtctgcatgggttttttgttttgagacagggtctcactctgttgcccagactagagtgcaatggcacgatcatagctcactgtagcctccaactcctaggctcaagcgttcctcctgcttcagcctcctgtgtagctgggactacaggcatgtaccaccacactgaagtaattaaaaaattttttttatagatagagtcttgctcttttgcccaggctggtctcaaactcctaatctcaagtaatcctcccattttggcttcccaaagtgctgagattacagcataagccatggcaccaagcctcagatattttttaatgtagttgttaacacactatagaattaaggctcagactggagtctgaacaatgattttgttcaactcccctacagagaagagagaaaaatggggtgcagtgatactgtgacttgccttagagcaccctgaaaatagaattttctattgtaggaaattctatgggtagacttggtaccttctttcaccagtgtgcactcagcataattcttttgttctggacccagcttatacaggaggagtctgtttttcttttgcttggtttttgttttgccagagtacatggttttattggattaaaccagtgttttgtaagcccctactgtgtgtcctagttgctgggaacatgctggccagcaagacctcatggcttctaccactgtggatcttattttcaaattgtggggagcaaggaaataaatacttttaggtgagaataagtgcaataagttcattaaaacagagtaatagtagagagacagagagagagaaaccagtagaacaagatggccagggaagaattctttgagcagatgacttttggaactgatgtagatgatgagagccatgtgaagacctaggggagaggccttccaggctaaaggaactgcactggcaaaagtcctaaggcaaaaactagcttggggtttggaaggtgtgcgaggggcgtcgtagctgaagcatggggagaccataaggaaaagcaagcaaacaacagattaagcagaagagtgacgtggttgatagacttatctgtgttatctgaagactggaatgtaggggacaagaatggaatcctggagatcagttaggaggcttttgccacgggcaagaggcaatggtgatttatatctggtggtgataatcaatgtggaggacagattagattcattctagcctgtattttgggaaaaaagtaaaaaggacttgtcagtagattggaaataagaaatgaaaaaggagtattaaggcttttcacatgaataactagatggatggtataagtgtatactgagatggggataacaggaagaggaatggttttaaaggagaaattaagagttttggtgattttgagagtcctagtagatttccgagttgggatgttaaggagacagggatgactacgtttgactgaagctcagaggaaggatcgatcagctctggggcagtttggatatggagagcatgtcttaggggcaagcttagctataaggagtacagtgtagacccaagccttgatgtgatgtgacatttaaaggtcaggcaaaagaggagaagccagaaactgaggctgacaaaagtgaaatggcagaagattggtgtcctgctaccaagaaaaagtgtttcaagaaggagggaatgctccattgtttgagctgcttttgagagatggagtaagaatatggcagaacagtgctgattagatttgatgtgatgagcttttgagtgaccttgacaagcagtttcagtatagtgatagggacaaaatcctgattggaggcttggaagaggggagagaatttcaagaattaagacttacacaggaagaggtgatggcagccagaatacggcttctggtagatgtatttatttagaaagtcattcattcagaaaaggtagtcagttgtcaaaaggatgatagtctttttgcagtggctatttaaagcacagtaggccaggcacggtggctcatgcctgtaatcgcagcactttgggaggccaaggctggaggattgcttgaggctcctagttcaggaccagcctgggcaacatagtgagatcctatttatatttttttaatgtaagtagatagatagatagatagctaataaatttttccttttctgtaaaatggaaaaattattatgtaagagaagatttctaacaaatttggaagcttaaaagatgcttttaccagtctgatgattaaacagtatttttaaacttggccttttcctcagtgtctttttgaggttagcctccttttaggttaggggtctgcagcacagatggggtacgtgtcttgaaggttaactggttgcgcagtatgctgtgtcaagccttttgaaagtctgaatgatggctcatgaaaacttttggtttgtttccatctatttttatttgttgcttgagtagattgacattcttacttaagcaaaaaccaggatttggagtataattcagtatagttatcaaaagaaccaaatttttaaaaagaaaaacacattaaaaatatagttatcaaataatcttagaaaattttggaattctaaaactgacaaggtaaacctgatacatgttgctatgtgtggatatgtaaagttaatctgattccaaatgagatgtgtggtaatgtgcttgatagtgtgcacgtgaactgtaaaccagtcatctagatgactataattataaacttactcagtaaagcccaagttagaatttttttcttctctttgttggattttcagtgtctataaacattgtttttaaaaatgaaaataggccgggcgcagtgactcacgcctgtaatcccagcactttggggggcccaggtgggcggatcatgaggtcaggagatcgagaccatcctggctaacatgatgaaactccgtctctactaaaaatacaaaaaaaaattaaccaagcatggtggcgggtgtctgtagtcccagctgctcgggaggctgaggcaggagaatggcgtgaaccctggaggcagagcttgcagtgagctgagatcgcgtcactgcactccatcctgggcgacagagcgagattccgtctcaaaaaaaaaaaaaaaaaaaaaggaaatagtctgattttcttactgtataagtaatagatgctgcttgcgagtcaacaatgcaaaaagacttaaaaagtaaaaattactattaattctgttacccagtgatgaccactgtgttcaacaacactatttttaaaatcttttttttttttttttgaggtggagtcttgctctgtcccccaggctggagtgcagtggcaccttctcggctcactgcaacctccgcttcctgggttcaagcgattgtcctgcctcagcctccccggtagctgggattacaggcatgtgccaccacgcctggctaatttttgtatttttagtagagacggggtttcaccatgttggccaggctggtctcgaacttctgatctcaagatccacccaccttggcctcccaaagtgctgggattacaggcgtgagccaccgcgcctggccctatttttaaaattttacacaagtaatacatgctcttagtaaaaagaaatacaaacaaaacagaattgtgtacatttgtaacagtgcaggaggaagagggaagaattagggtacctggtgcacttgaaacaggagaaccccaaaatagctaacaggtatttgcaagaaagttcaaccaggctgagagcagcaatagaaataggaaagggttatgctctctgcagtactgagtgagtacaaaggatctgagagatttggagcagtccagcccctatgaactcaaaagactggcccaacaagccttccttttgggacagggcttcatactcaggaaaaatgactgggagtggaatcaaaattgagcagtatagggacatggatacaaaggaaagagatggtccagacaaaagtaggggaggagaatggagactggaattcctaagaagcaaggctcacataaaaatgagcaacagaaagtatcaagcaaggtcaaatccactgcagaaagtgtcaagcaaggtcaaataacacaaagttattattaggaaaaaggagaataaagggagaaataacacccctgtggacagtgaaagcacaccagtaaatcactacttcaaaacaagctcaaagagaataagaaaatgatacaagacttgaaagatgaaaatcagagtttttaaggctcataaataaggtgacagaaagaatgagaaataaaagaaaaattcattctagaaatgaggatgcaactagaagcaacacaggggatactaactgaagaaaaatagaagttacaaagaggaaaaaaatttaaattaaaaggaaatgaggctgggcgcagtggctcacgcctgtaatcccagcactttaagaggccgaggtgagcggatcacctgaggtcaggagttcaagaccagcctggccaacatggcaaaaccccgtctgtactaaaattacaaaaattagctgggtatggtggcacatgcctttaatcccagctactttggaggctgaggcatgagaatcgcttgaacccgggaggcagaggtggcagtaagctgagatcacaccactgcactccagcctcggggatagagtgagactaggtctcctaaataaataaaaggaaatggaaaagatataaaaagaatttgagaaacagtaacaagtatttaagacaaagaagattgaatgtatgggcagcaggagtccctgaggaagaaaactaaaccaatggaatagaacaaatgataaaaatgaattcaagacaactttcttaaaataagagattctaaactatatttaaaagagtatcatgtggccaagaatatcaatctaaaaagtccaacactaagatatattctagttaaaggagaaattatttagacatgtagaaaaagaaagcatatgacttacaagggggaaaattagattatgttcagatttttcaacagcagtgctttctgctagaagaaaatggagtaacatatttagaattctcagggaaagaacaagccaaggattttgtgtccagaaaaactgactttcaagtagaaaaaacagacaaaacgttaccaatttataaggcttcggggtatattaacatgagcctttcttaaggaatctattagagaatgtgcttcagacaatcaaaatagctagacctaggtcatcataaggactgatggtgagcactaaatatatagttagctgtagagctaagactgaaggaaggctgaggaggagagagtatcggatgtaattcccatgcactgtcaattggatacgataaaactttaaggggagcaggactgcatgcaaaaaaataatttaatgcattcagaaattagtattagtattgttattctgaaactgttgtctgagatatgtggtaaaaacaaataagtaattacggaatagtctaattctgtcattttctatacctttgaaatctgtattcttggtgtggaagaaaggagataacaaatataatagtatcaaatgtaatgaaaaagcagtatagtcttggatttgaattttcaaattgaaagtattaatatgaactcagaaggcgtctctcaccacaccccccattctcttcatctatccatctatttgtctcctagttctgttcactgaaaagactagatacaatcatctaccccagcagcactgagcatccttagcgtccagattgtgaacttgaaatatcatttctcaccaaaagaaaccagagtttcttggagaaatggctgaatccaggtctagatatgaaatgtgaagagcttgaaggacccatcttgtaatactggtcagcaaggaagttatcaaagcatagtaggaggatatcagaaattctcagaagccaacccgaagaggcttacattggccaaagagaggacagtttgaacttcaagaatgataatgtgccatgaattaaaactcaataaatatttgtaaatttatgactcaataatgatttaataatgtatttaacaagaataatttaccttaagaagatcctaagaaaccagttcattaccttgaaaacaggtaaagggaaagaatcaggcatttattatgccttttgtatatgagctgtacaactggatagccaactagtatatcctcattagaagcacctctttataaaattattacagctaataaatgacaaagacatagtaggattagaacatcactattttcaactccccataaatgaataaatataggcgttaagcatcaatgactgccaagatcacaaaaagacagctacattttgtgtgtttcctgtagtcttgccaaagagatccaccgtcagcttgatccattctttggatgtagctgcgtatttgcaggaaatacagaatatagagggaaatgttgaaccgcaccatgagaatgcaatcagcaaaatccagactgggaaactccacaggtcacatggcctgggtctttcaacagaaaagaaaatgaaaaggatggagaggggactgtggattaaaggaaacctaaaagacatttcagcagtgagatttccgaccatgcctgagttgagatgagcaaattcttccctcaagggcagaattgacagaataaccatttcagtgctctggaaattaaccaaaggtatataacatctgagaatcatttatgcctgaaaagctgctgagcttcagatatgaagcagaagtctgttgcattctttcctgggcattttcctatcccccaacacttcagcttggtaatgtggagggacaggttgtaaatattagcagtcttaactgctgtcactgaagggggcttacttgctttgggagtgggaagtcatgcctgtgcccagcagctttgtcagtggaaatgacaattctggccacagaagagcaggtatgaccagccactctattatcctgaactcgtggtcatggccagggcaagtatattcttggctgaggctatgcacatgtgtcgcggagaccagggtgggcccgagtcagctgcaaactcctgactagccctcaaactgcatgcacgtatagagaatatgcagaaaggccctgtgaaatgttaaagttgaggaagactttaaaatggtctgaactttgaatgcatttttgtgctgacagattgtcagagaaaggaagccttactgacttgaggtgtttgagcacaacttccgtcccatcattggctgactactgtgctacaaagatgcaggtgcaatccgtaaaaagccaggcttaaagataaaaacgaattttttaaaaacccaactgagcagaaccatcaggggctgcacaacaagggaagacagatttttctgaattagcctatgccggttactaaataaagatagaaacaacaaccttcagggggaaaatcagagccagagtagctacaatgtattatctgaatgtccattttcacctaaatttgagacattaaaaaataacaggaaagtattgtctcaccctcaagaaaagaggcagtcagtaggaactatctctgatccagctgttggattcatttagcagacaaaggcttcaaagcagcaattacgttcaaagaactgaagaactaaaggaaaacgtggaaatgaatcaacagacagacactctccaaaaaacaatagaaattacaaaaaagaggaaaattgaaattctagaaaagtatgacaattgatgtgaaaagttcaataactggccggccacagtggctcacacgtgtaatcccagcactttgggaggccgaggcctgtggatcacctgaggtagagagttcgagacccacctggccaacatgatgaaaccccgtctctgctgaaaatacaaaaaattagctggacatgatggcaggcgcctataatcccagctatgtgggaggctgaagcaggagaatcccttgaagccgggaggcagaggttacagtgagacgaaattgcgccattatactccagcctgggaaacaagagtgaaactctgtcacagaaaaaaaaaggaaagttcaataactaaggctgggagcggtggctcacggctgtaatcccagctctttgggaggctgaggtgggcggatcacccgaggttagaagttggagaccagtctggccaacatgacgaaaccccgtctctactaaaaatgcagaaattagctgggcgtggtggcagatgcctgtaatcccagttattggggagtctgaggcaggagaataacttgaacccgggaagtggaggctgcagtgagccaagaccacgccactgcactccagcctgggcaacagagtgaggccttgtctcaaaacaaaaacaaaacctgaaaagttcaataactaaaatgaaaaatttaccacagggtcttaatagcagattcaagatagcagaagacagagtcagtgaagttgaagattaatcaatagaaattattcaatctgaagaatatggaacaaaaagattgaaaaaaaataacaaagtttcagagacttatggaacaagaccaagtttaccaatatgtgtgtcatgggagtcttagaaggaggatcatgagagaaaggtacagaaaaatatttgaagaataaaagccaaacacttgccaaatttggtgaaaagcaatagtctacacaatcaaaagctcaacacacctcaagtagggtaaatacaaagagatctacacccagacacatcatagttaacctacggaagccaaacacagagataaaaccttgaaagcagcaagagaaaagcaactcatcatggataggggagcatagatataaataacagcagacttgtaattgaaaacaatggaggttagaaggcagtggaatattcaaaatgccgcaagaaaaaattcaacccaaaattctatattcagcaaaactatcatttaaaaatgaaggtgaaataatgactttttcaaataaacaaagactgagagaattcattgctactagacctaccttagaagaaatactaaatgaagactttcaggatgaaatgaaatgacaaaaggtggtaactttaatatatggaaagaaatgaagagcatcaaaaatggtaaatatgtaggttaatttagaagaccacataaatctatttttcttcttttctctcaagtttaaaagatataagattgtataaagtaataattataactctattattgggcttataacatattataatgtatgtgacagtaatagcacagaagaggagaaagggaattgagctatatttgtgtaaagtttctatattctgccattagaagttgattatgataaattaatttggagattttaatccctacaacaaccacatagaaaattacttttggatgcatacagtggctcagccctgtaatcccagcaccgtgagaggcttgaggccaggagtttgagaccagactgagtaacatagcaagaccctgtctctacaaaaaaataaaaacttagctgcatttggtggtgcgtgtctatagtcccagctacttggaggctgaggcaaaagaatcccctgagcccaggagttcaaggttacagtgagctgtgatcacgtgactgtacttcagcctgggtgagagtgagaccttatctctaataataaaagaaaaaaaagaaaattttaattactattattatgtaataatactcttttcagttagctctctcaggttgaaaagaaaatttacttttaaaaaatagtaaaggtcagacatggtgactcacgcttgtaatcccagcactttgagaggctgaggcaggacgatcacttgagcccagaagttcgagacgagctcaggcaacatagtaagacctcatctctaccgccccaccaaaaaaaaaaatacacgtatatatatatatgaaactgggtgtagggatgcacacctgtggttccagcaagttgggaggctgagctgggacgatcgcttgagcccagaaggtgaaggctacagtgagctatgatcatgccatttcactctagcttgggcaacagagtgagatcttgtctcaaacaaacaaaaatatttaaaaaaaatcaatagggggcatttaaacactaaaatttatttactccacatgaaagaaggtattaaagttgggacagagaaataaaaaagaaggtaagcttttttacttttttttttttttttgagacaaggatctcactgtattgcccaggctggagtactgcggtgtgattgtggctcactgtagcctcaacctcttcggcataagtgatcctcccacctcagccttccatgtagctaggcctacaggcgggtaccaccatgcctggctaatttttaaaattttttgtagagatgggattttgctatgttgccctgtctggttttggactcctgccctcaagagatcttcctgccttggccttccaaagtagtgagtttacaggcataagccactgtgcccagctggaaacatttatttttgttttatcatttcttctttattggttagaatatttttgtataaagatgcttccagggccaggcacagtggctcatgcctgtaatcccagcactttgggaggccaaggcaggtggatcacctgaggtcaggagtttgagaccatcctggccaacatggtgaaacctcatctctactaaaaatgtaaaaatagccgggcatggtggtgggcacctgtaatcccagctattcaggagactgaggcaggagaatcacttgaactcgggaggtggaggttgcagtgagccaagatcacgccactgcactccagcctgggtgacagagcgagactccatctcaaaaaaaaaaagaaaagaaaaaagaaaagaaaatgaataaagatgctttccccatcaaacatgtggtttccctgaggtataataaacataggaaaggcaggttgcagtttgatttttctaccttttatttactagttttcaaagtagtaaattgattgccttagtgtcctccttttttgaccagttaggattttatttatttttaaatatcattttgaactcatggatttaattatatttgagcctttaagtccactgcagttattattctttttgattctcatcttgtttgttctgtcttcaggttgagtcttgagtccttttgatgtgatccttgacataatttttgttactctttaaaatgattaacttgaagccctattttaattggaatatattacagctggaaagtgattttctttaagcagtactgggttaattattattcagtgttgaaatgtgattggatgtgaatggtgttgagctgttttttcttcataggtatgggaggtatcgccagcatgccaccgcttacagctgttgctccagtgccaatgggatccattccagttgttggaatgtctccaaccctagtatcttctgttcccacagcagctgtgccccccctggctaacggggctccccctgttatacaacctctgcctgcatttgctcatcctggtatgtgacttgctgaaaccataggctgagtttttactacttgtattttgctgttcattattaaaatattttctcttcacgttctgattatgtttaaatgatattttagtccagaggaaaatatctttatttttttcacttgatttcacattttttccactgtattaaatgggatatgttagtgtggagagagtcaaagagaattatagatttctgggtaccactgtggacaaaggtgagctcagcagtgaaagccacaaatgtaattttctttcaagggctgagaagagcaattgaagttgaactgtagttgaacattttctatttttatgtatcagttactacttttctttagccactatgaattgctaataagcaagccaatcccctaggaatagaactatgttgggggttgtgggaaagaataaaaaagaacagtttatactattttatggtattacatgcctgcttaattgaaggaaaggatttaaaagtttctggtttaattaattccactttgagactttattaagtcttttttcctttagttaaagtataaaactgtagatgtagatagccttggtctaacatcttaatgaattcatatcaatatggaaagtattatttttaaagtactttgactacatctaagtaaattcagtattgacgacatgggttttagcatcatacttgaaacatttctgcgcctttggccccctgaatttgttgtatatttatcaggatatatatttaagttatggccaaataagctaaatgtatctcctttttttagattttttcttgtcacatgtagttcatcttgcatatatgaccatgactgtggacatgatggtagcccagaaagtgtgtgcagttgtttttccaggagcataagcaaatccacacactctgagtcttctattcttttgtgactaatggcacatgttgcaagtcatttgccatcaggcaagagtgagggaatgtggctaagacgcagtgttttttttctgacactcaactaaccaaccccagtgataatcagacacaaaagctgaccttccctagtgtcacatgttatctggccaagactacagtttgtgacttcttggctcttacatctggaactaatacttcagctccttcagtgcagtgaataaaataccattttatatatttaagctgttacctctttaactgttggaataggtcctataaaatgtgatacaaaatgtttaatgaagagtaaaattttatggaaatcagcattactacatagtaaggtgattttcagtagaacaagtaaatctagaaacctttttggcaggaggacagagggtaaggagggaaaagctcttttcagtctaggctggcaagaagggggaattatttctgcctcagatttgttgactgtgcattttaatttttgtaaattggggaaagtttcttatctttgtagaattaaaattattcaacatttatttttacagcagccacattgccaaagagttcttcctttagtagatctggtccagggtcacaactaaacactaaattacaaaaggcacagtcatttgatgtggccaggtaagtttgcttgtttttaaatgggaagtttggttaaggccattacctgattaaatcataaatttgaccatgaatcatctatattctttttgttgttgtcatcttttttgtaggcttttgtagagtgctaataataattttcttaatttctggatagtgtcactagtttttatcattaatttgttgcagagatgagagaaatcaaggacataacatttccttaaaggctttgtgtatttttttttttttaaagaggataacaaatggatagtaataaaatgtttaaaaacagtaagataaaattctgggtataagggaaaaaagcaaatgaactattttatgtgtttatgatttacaagtttatgtataaaatttttgtatgaagattggagttatagttggccttatttttaattctatctcagataatcttgtggagtttatatgggtaattagtaaaatcctattaaagacgatttattatgaaaagaattatccagatagtggacaattcacattaatcaaatgtgtggctcaattttattaaagctgacatgacattattgcttatgttttggccaaccttggtttcaattattacctttcatatttttattttactcctatgttttacccttgcatactgctacattaagaagagaaattaagtctcttttaagccatctcagaacttttgggccgggtgtggtggctcacacctgtaatcccagcactctgagaggctgaggcaggaggatcgcttgagctcatgagtttgagaccagcctgggcaacatagggagaccttgtcgatacaaaaatttaaaaatgagatgggaggatggctggagccagggagatcgaggctgcagtaagctgtgattgtgccactgcactcttgcctgggtgagcctgcctaaaaaaaaaaaaaaagcttttggaatttatcctgtcttatgtcaatcctcactagaaattgttaagtgaatcaagtcattttcccactttcaagagaaaagcatgttgaatataattcagtgatgccttcattaccttttaaaaatgatttaaagaaaatccataaactgaaaagcactgtgccaaaagctttacattaactcattcttccccatgagatgattctgttactctctgttatagatgagggacaagctcagagacattatgttactcgtgcaacagaacgtaactcataagtgacagagctgagtcaaactgagatgtctgattttaaggcgtgtgttcttaactatgcaagttttctctaaaaaacttaattgtaggatacaggtatttatttgtgttccatttaattgcggttttacccttaagatgcctcaatatgtattgggcatctactttgccaggcacatcattaatcctattcaaccccatagctacctatgcagtagatgtctcaagatggtgcatgaggaagcacacccagagaagctctagtcctcacccatagtttacagcttagtgcatggtggagctgagagttaaacctatatcatcttacactaagttcctttttaaaaaaaattctcctgggctgggtgcagtggctcacgcctgtaatcccagcactttggtaggccaaggtgggcagatcacaaggtcaggagttcgagaccagcctggccaacatggtgaaaccccgtctctactaaaaatacaaaaaattagctgggcgtggtggcgggcacctgtaatcccagctactcgggaggctgaggcaagagaattgcttgaatccaggaggtggaggttgcagtgagctgagatcgcggcattgcattccagcctgggtgacacggcaagtctctttcttaaaaaaaaaaaaaaaaaaaaaaaaaaaattctcctataccatgctgaagttttgagtttattatgactttgcagaagcaattttgaaatctgctttattgatttgtgacattagaatgaactatcagtattagtgaacattagtgctattgaaacaactgttttatgttgtcacctttttaataacttaaatttctagccaatttttgcaatgcagtattgaacttttgggtacatcttcatgagtttttagtctatttaaattctcaggaatttggcagaaaactctgatgtgataagtgtaatctgggacaacttgtgtatgtaacacccaacattcctggcgtgtagcaactagatagttagcttcttgacaaataggtgggagttggaatcagcaaaatattagttagttaacatgagagggttggtgcagaagtacccacagcagaatagatcatggtaagtgttttttattaagaaattcataaaaattgaaaaaggtgaattcatataagtacttctcgagtgtttgggaggtatttcctatacttgaactgtatataatagatataagtgcatagataacacatggaaatgatgattaaaaagttcagtatttcagtaagattgtgcttttacatgtttgaatagatatttttgttgaagtgaaattgcagacagagcattagctgtaatctgtcctggaaggggaatgccagttttactgtctgagctcagccattgggtttaattcagatgtcgaagcttaacaagccattggtaccagtgtgatatttgtgtggacagtggcatctgaggaactaatcactaaggaagtgtagacgcagcctaactactggcaagtgtgtccttgggccagctcaggattgtggcacattggcaaggagagatcagtattggattgtagtcgagaaagtgaagctgtctccattcccactctgcttatgtgtgaccatggaaatgttctgttctctctctctctgggaaactgtccaatgggtctgaatttaaacttaccagaatggagtaatttcacttcattaagaaatgggtcctgtatattcacgtatagaaagttaaaacattttggagaattagtacctttaaaggcagttattggtttgcttttagcattgctttttaaccaaaaaagaagtgttttagaaattagaatagcctggacattattgttttacctcagttacaagaggtttttcatacttttatagaacctttaaattattatatatacaacttgaaacagcctctcagtctattgtgtttatccatgattctggaaaaataattatctatttgagggaaatgtttatgatcttaaaaatgggaaatacccatggcaaaaaaaatcagaagtagtgataataaaatgaataaaatatgaaagttagagatgattatctagagaagttcttagtttactgtcattaaggaactttaccaggctgttccttatggataatcctctttctctcctttttcttttccccacagtgtcccaccagtggcagagtgggctgttcctcagtcatcaagactgaaatacaggcaattattcaatagtcatgacaaaactatgagtggacacttaacaggtatttacaaataaaaattagtgaaatatgatctttgttttcaatgtaaactgtttctagatattgggtcatagatattttccatgtctgtgtgcttatttcttggcagtgtttcctttgtctctgttatctcatgttcttatccactgataactctttacatagttatatcattctctcatgccccattgctttgtggtaaaatggaatatagaccagggatactcctgtacgctgaaagccactgatatgcaaatcaaggcactagcaaagaaacacttctttgaacaaaaactagcttcaacttctgaagtccagctttgaacttgatgaacttgaagctgtctgttcactaggttagagttggaggcagcaggcagggtaaaagcagggagttgagaacatggctctgtctcagataactgcctagatagggctcaccactttggatatttctttatctattaatataaaaggccagagttaacttaggtgatctcaatggatttttttaaaagaagaatgattctgttatctacgtcagaaggatagacaggaattttagcatactgttcaaaatttttctcacgaaggtttaaatacttgttagaaagttataaagaaggctgggtgcagtggctcacgcctgtaatcccaatcccagccctttgggaggctgaggcgggtggatcacctgaggtcaggagttcaagaccagcctggccaacatggtctctactaaaaatacaaaaattagccgggtgtggtggtgggcacctgtaatcccagctactgaggcaggagaattgctggaacctgggaggcggttgcagtgagtcaagatcatgccactgcactccatcctgggctgcagagtgagactccgtctcaaaaaaaaaaaaaaaaaaaagaaagttataaagaaaagcataactttaatgaaagaaaatagagacctctgatatgaatattaaatgttaaagggaaaaactaactgccctctaacaaatatgaaaggaagggaaaaaaattaggtttcctgtgtggtggagtggggtaaggggaggattataatccaaaacacttttaagaaatgattcttactattttttccttgctattacttaaaattgcaatttttactcccaaaagaaaaaaggtatcttatgtttaaaaatgtcagagttggacgagattttgaagggttctaatctaatcttgaactctggtccctttaaggatctcagcagtcaccccaaataagcatgtatttatgtttgaatgggtgaatagtaaatacacacagattctcgatgtgtcatactgcctcataaagcagtagctgtcaaaaccagcctaccttatgcaggctctgcttttttttttgagatggagcttcactcttgttgcccaggccggagtgcaatggtgtgatctcagctcactgcaatctccacctcctgggttcaagtgagtctcctgcctcagcctcccaagtagctgggattacaggcatgtaccaccacgcccggctaattttgtatttttagtagaaacagggtttcaccatgttgctcaggctggtctcaaactcctgacctcaggtgatccacccacctcagcctcccaaagtgctgggattacaggcatgagccaccacacccggcccactgaaggtatatttaatagcatatttttaagtactgttttacatggtttgtttgacaccagtgctccatacaaacccagaactacattgccaatgaatccaaaaatatttcttgaaaacgttggtgtttgctgtgagttgattaaaatagtattcaattgagacattgattgagaaattctctctttcttggtgggatgtgtgttttatgaatgaaatgcagtatctacattccaaatataatgacccaggcacttgagcatttagaacttttaaatatctgaggcagaaagtaaaatttgaaatatactggaaagaaagcagattttgatattgtttatctgcatacttattgctactttgatccagcaagaatttaaggtgggaattttacttttgagccagacctttgtatagtcatgtcaagtagaataatttattacagtaaattttaaaatgggaataaacaatagaaatttaattttttttccctttatgtacttaggaatcaatatgaagtatgttttatactaaattagaatgttgatggaaacagctgatttgttgaggtggatggaacataaaggtcattgtcttgatcacaattataaaaataattttatgaagtcagaatccccaaagcagttcactcagctgcaggagaagcaaaatatcaagaaagttgagaaaaggtttcagtatataacatggcccaaaagaaatatataatttatatttgtaatctcttgtttttcatccttcttgcttttgttttttgtgggtttttgttttcaggagctaaaaagcacttcttttctttctttttttgaaacagagacttgctttgttacccaggctggagtgctgtggtgcgatagtagctcactgcagccttgaactcctgggctcaagcaatcctctcaccttagcctcctgagtagcagggactacaggcgtgcatgcaccaccacacctggctaatttttttaaaaaagttttctttagaggtgggatctttgttgtccaggctggttttgaactcctgacctcaagcagtcctaccaccttgtcctcccaaagtactgggattacaggcacccaggctgaagtacagtgacataatcatggttcactgctgcctggatttcccaggctcgggggatcctcccacctcagcccccaagtagctgcgactacaggcatgtgccaccatgcccagctaattttttgtagaaactgggttttgccatgttccccaggctggtctcgaactcctgagcttaagcgatctgcttacctctgcctcccaaagtggtgggattataggcgtgagccaccgcgtctggccttaatagtggcactgtttaccccactgactatctgggttgatttagccgatacatcctgttggacaccctgttcttccttcatggcttgatgtgtaactgttgcatgcccttaaaagagactgccttataaaatagagagggatcattctttaattaaggttatgtaagaagctctagaactctggtattcctgttaataatgctagcccttcttctcaaagaggtattttattgttgcattctgaaacaatgaatatgctatttggtaattcatctattaatcagaaaagctaaagtcttagtcattgttttaaataaagctcatttcatgtagttactctctcctttctagccatacttccctgcccaaacatggatgccagaagtggggtttgtgtgcttgggatttctggttttattcctatgttcccttataagccagtactccaaaaccgatatccctttatgtacctaggtttccacagaagagttctgtgcactcaaagctcaactgtgtgttgtccaaatgtgctaagatgctatcttagctgttgctgatctatttttaatattttgcaacattgatttaggacatatgtagacaaatagtagaattacaagagataattgtgatcttctagtgtggggattggcaaacattttctgtaaagaatagcacaataaatattttaggctcataggtcatatgttctctgctgcaactactcaactttgccatcgtagcatgacaacaaccatatatcatgcttatatcagtggatatggctgttttaataaaactttgcttaccaaaacaggcagtgggccagatctggcctaagggctataatttaccaatccctgttgtagattattttcctcatttcacagatggaagaacttcattttagaaagttaaagtagttttgttaatgtcacatgccattagggagtcaggactagaatccaagtcccctgatatccaggtttagagctagttcttcacatttattgttaggctttttatgtgtaatagataaaatattaacttccttttttatagttctggagtaagggcaattgttacaagtgtaaattaaatcacccactaaagttttgttaattctactttgttaccaacattctagatacaatgttacagactaaagaaagtgatgcctgaactttgctcattccattgtaccacagtcctttagaatcttcacatgaattcagtagattgttttttattcttagatgctcccaaaacacacacgtgctcatgtatgcacacacatccagcaggaatgtgttcatatattcaccaaaagttagaatgctcactattaatagtagccctaattgaagactaactgaatgcctatcaacagtataatggacaggccgggcacagtgactcatacctgtaatcccagcactttgggaggccaaggcgggtggatcacgtgaggtcaggagttcgagaccagcttggccaacatggggaaaccctgtctctactaaaaaaaatagaaaaattagccaggtgtggtggcgcatgcctgtagtcccagctattcaggaggctgaggcagaagaatcattgaacccgggtggaggaggttgcagggagccaagatggcgccactgcactccagcctgggtgacagagcgagaccgagactccatctcaaaaaaaaaaaagaaaagaaaagaaaacagtagaatggacaatgaattaggatgtaatgacacaatgatacactccatagcagtgaggattaatgttctacaactctacacgacaatatattgagcaaaataagccaggtggaacagcggacaggctatttggttagaagttaggctaccttggtggtagctgagtctaaaagagaggcaaataggggcatctggggtgcgattatactctctttcatgacctccatagtgtttgagtattttcactttggaaaattaattcagctgtgtacatgtgcacatgtatatatccacatgtatccgtatgtgtgcttttctgtcaggattttatatgtaaataaaagttgaactattgtcagtaatgttacctgccattagagcacctctcatgtgctaatgtgatgctaagctcattgccccaatggatcatagactggtttatctgaaatgagcaaactaggatccagactacctggcccagtcactcagcaaagtctagactaagccaggactagagcctacagctccttggttccctgacctctactgctggccatgcaaaaacacatccagttttgtggtttttgatgaggtgacgtttgaataaagaaatagcaaaaagcaaaaacatatacaccagaatcttcccaacaaaattgccacagccttccattcctctgtccagcagtcttcctgggaccacatcttgagaggcagtgctggaaaggaagacgtatttatttctccctctctgactgtagtttatttaaactgagtctcctactgtgcgtttgtctgatgtctaaggccactttcataccagaagtgaagatgtttatgattattttaagaaatgagagcttattttgagagaagagtagaaattccaggaattcttcttttttttttttttcttggctaacataggaaatgtgttttgttttgtttttttaattgagacagtgtctcactctgttgcccaggatggagtgcagtggcataatcttggctcactgcagcctccgcctctggggctcaagcgatcctcctacttcagcatcccgagtaactgtgaccacaggctcatgccaccattcccagctaattttttgcacttttggtggagatggggttttgccatctggtcttgaactcctgagctcgagccatctgcctgcctcagcctcccagaatgctgggattacaggcacgagtgaccacaccaggctggaaatgtgttttaatcctggctattagcgcttcctgcaactttttttttttttctttttaagtctgtttagtgaaacagtttcccggagatctctccgaggtcccttcctcctctaagattctccgaatcttccctgaatttgcctgaggttgagcagggtggagacagcaggtggtagcagcggcaaaagatgttaaacttaaagagaataactttcaagtttgtaaataaagcccaatacaaataaagatggtaatgtggacaaaaggtcaggttatattttgaaactctaaatctttcacatggtcattctttatcaaacatccatttaacaaaaatttattatgtgtcagatgctgtgctctgtgtttctcctctttttcattggggcttaatttcctttttacaaagcccctgcggtagtagcaaatgttatttaaagcattgtgattgcatgaggtcatggagtagtccacatacgcagaaccctggtcctcctgtacagtgagtatttgctgactcatctgtatgtccttttcctggttcctgtttaggtccccaagcaagaactattcttatgcagtcaagtttaccacaggctcagctggcttcaatatggtaaggaatgaaaagttctttggtttggataaagtggaaacttggttagattggtgtggcctcatgggttttagattaataccgttttttatgggggaatatgtagaatttgcttaatttcagtgagttgtaatgattgcctcttttataatactatttcccctctcaattttgaaaaatacaaaagcagattaatacaataaattctgaaggagtgataatacaacttaacaattctcaactcgtgaccagtcttggctctccctgtctttgatttctttttctttttttttttttgagatggagttttactctagttgcccaggctggagtgcagtggtacgatctcggctcaccgcaacctccacctcccgggttcaagcgattctcctgcctcagcctcctgagtagctgggattataggcatgcaccaccatgcccggctaattttgaatttttagtaggacagggtttctccatgttggtcaggctggtcttgaactcccaacctcagatgatccacccgcctcagcctcccaaagtgctggaattacaggcgtgagccaccatgcccagcctctttgattattttaagccaaatcttagttattatataatttctactgcaaatattttagcttttatcttcaaaagagagggattttcctttttttcattcattattattattattacttttgagatggagtctcactctttcatccagatggcagtggtgccatcttggctcactgcaacctccacttcccaggttcagcctattctcctgcctcagcctccttagtagctgggactgcaggcatgaacccccacgcttggctaatttttgtttttttagtagagacagggtgttgccatgttggccaggctggtctcgagctcctgacctcaggtgacctgcccacctcagcctcccaaaatgctgagattccgggggtgagcactgcgcctgaccgactttcttcttagcacagtcataacagcaatagctcacctaagtttttcagtagtcatccttatcattaaattaatcagggaatgttcacattccttagagtgcctcagaatgtttttatagttcatttgttcagctcaggactgaaataagcctgtattttgcaatacttgagttttccatcttttatgtctcctttaatctataaatttccccttgtcttgttctctgcttcttttcccaagtcccccaggccgccccccaaccaaaaaaaaaaaaaaaaaaaaaaaactccgttaaaaacaaaccagatcatttgtcctgtagtttcttaatggcttaacttttgaagagtgcgtcactgtgggattgtctaatttgtttctgtatttcctgtaaattgataattagatctagagcaaagtttcccaaccccagcactattgacattttgggcccgataaatctttgttgttgggggatgtcctgtatactgtaggatgttcagtagcatctgtggccactactcactggatgctagatgccagtagcatgagctccacacccagcatgacaatcagaaatgtctccagactttgatagatgtgccttggggtacaaaatcttccctggttgagaattgcggatcagatttgatttttttttttgttttgttgttttgtttttgataagactgtgccagagaggtctctgtgtactctcctcaaaaggcacataatgtctctattgtgtaatgattttgaatagctatcgatgagcattgcctgggtcctacaggcttccttaaatttaaatgttaactagaatggtttcttaagaagtgtgcatgttatagctgtatgttggtgattgtccctggaaaataaactttgtctacaagactcactgcaaagttcgtgattttcttgcaggccacattgatagggttgtttcacaaatgatcaagctctaatgcagcttcctttgcccttctcttcccttctgttttgtatgaaagagcttgcctttggcagtagaccagaccagttaataaacatcttatatctttgacacacccagaactctttaaatcagggtattgaacagtatcctagggccccctgaaatataaacttaagatctaacattaatggaggttggttgacaatttattaggttgttctcatgataccagattatattgaaatatttattttaaatttctcatttataacttatcctatttgagaaaaacgcttgaggcttcttctgttagaatgttatattctggtgctacacactaaaaaagatattttaattaaatgcttataatcataatttaggtaagtgtggtgaaaaaacaagaatttcagccaccttctaactggtttacctaggactggctaattgtgagacacaaaaaggaacagaataaggaagagcgggcaggggtttcattttatttcatttgcatttctttttaaaactgggtatcttgcatatgggtatcttgcaaaactagaggaacagaaaaaagatcagcagttgccaggggatgggggcaaaggagggagttgctacaatcagatgtggaattttaggtagagctgacactattctgtatgttgtggttcatgtttgtcaaaactctcagacctatactctagaaggtgtgcattctactttatggaaattataacaaaaaaagtttatagcacctaaggaaatttcagaattaagaaggtttcttaatttttggcattggcaaaaccagtttcccattgcatttgtcctgttgacattctagtgaatggatgtgttgtcatgtatcttcttttgatggtccagaaattgtttagtaaaatcacattcttggacttgccaggagaatgtttgctgtaattagctacttgggcaagttcattatgaagaatgatggagattgaatcctgagattgaggaagaggaaacacttagactctgtggctggagttcataaagatccactgtgtaggcctagattaaggggtggccagctctgcccagtgggccgaatctggcctgcatctgtttttgtgaagaaagtttttatcgtacaaatagccatgcccattcatttatatgttgtctatggctactttctgccaaaatgacagaattcagtatgataaggattgtatgtcttataaactgtaaaatatttactacctgaccctttactgatagtttgtcatttcctggtctagagcagaacatttaacaatatagagctgggtatggtggcttatgcctataatcccagcgatttgataggctcacttgaggccaggacagatcagcctgggcaacacagtgagacccccatctctacaaaatattttaaaaattagctaggcatggtggcgcacaccttgtaatctcacgtttgggaggctgaggcaggaggatcatttaagcccggaaaggctgtggtgaactatgatcttgactgcagtgaggctgcagtgaactgtgatcatgactgcagtgagtctgcagtgagctgtgatcatgactgcagtgaggctgcagtgaactgtgatcatgtcattgcacatcagcctgggtaacagtgagagctcatctgttaaaaaagattcatggaatatgagtgtattatatgttaaatatgcaaaggttggggaagagtatcattataatcatagcatttgttgaatgaggaacactgtcccaactacctgtaattttatctttgcagcagtataaaataggtactattttgacaaaatgagggacaaagagactcagttggcctgtggtcaataagaaaacataacttttaaatcactaatgaatagtaaaaagcatgaattttcatgaaaccggattacagttaactttttgttgaataggaatctttctgacattgatcaagatggaaaacttacagcagaggaatttatcctggcaatgcacctcattgatgtagctatgtctggccaaccactgccacctgtcctgcctccagaatacattccaccttcttttaggtaaggaacatgggctctgatcaggaattgtatgcggagtatatgaattccaaacttggctttattgactatgtgtcttacctgattttcatccctgacaaggaaactaagtatccgtgaattctagagactctcatctaggtctatgttaatcttgggcccattttgttcttcaaagtacttgaagtatattagtgaaacaatgaagtaaaacatcaatagattgttgattttctaccaacctatgtcatcaatgcttaccagaaattttcacaacagatgccagcagcaagagagaaactgcatgagcctatgcatagagaagaaaccaaggagatcacacttgtgaattccacacatttcagtggtaacaaaagctgctagcaatgtagaaattataatcaggaagacaaagaaaattaccctggactgaaagacagtctcagtaaagatgtcaagagagtcacctgaggtccagtattgtgactggcatcctcatttacatccatgcatgcatgcacacgctgtccaggacagctctgtctcctggctttgaacataaaaactgaatatgagatcttacaagtacaaaggagaatgaaagaaagattaagatttctgacctgagtcctcaaactgcaggaaggactggggcaaaatcccctttaaatgaagagaaatagagccattactgtcagcacacacgtggtacaggagcaagctgaggaaactgtgactatgtaggaagcaacagatagctgaggcactttgcctgtgaaatcccacaactgcaacattggaagctgataatgaatgcgtaaaaaggattgggagacggtttaaacacagcaaagttaaaagtgtaaagtggggagggtggtgcggtggctcacgcctgtaatcccagcacgttgggaggccgaggcgggtggatcacttgaggtcaggagtttgagatcagcctggccaacatggtgaaaccccgtctctactaaaaatacaaaaattagccaggcgtggtggcaggtgcctgtaatcccagctactcgggaggctgaggcaggagaatcgcttgagcccaggaggcggaggttgcagtgagccaagattgcaccattgcactccagcctgggggacaagagtgagactttgtctcaaaaaataaaataaaataaaatgacataaataaataaataaataaaagtgtaaagtggaagaaattagtaaacaaagtgatttgttttacgaactatatagacattgcatgtgtttcttagggggtgaaatggagagatgggaaagggaagagagatgctcctagtgagctgagctgctgatcttcccttggaggaatttaaggttacttgagagggcaatggaaatagcagctcccacttagtgctcaccatgtcccaggcattgttcttaccactttttgattattaactactttcatcctttggaattgtttcaattttggtggtgattcttaagcttggcactcagagtctgatgacattccaatattcattaaaaaactctttgtaaatagagaagaccaaatctttatattttccttactgtaaatgaaatttgctccatggcatggtaaaatctttaaaaatccttcttcataacttgtccaactccacccagacagctctgtgtgaatctatttttctttttccccgcaattgcagaagagttcgatctggcagtggtatatctgtcataagctcaacatctgtagatcagaggctaccagaggaaccagttttagaagatgaacaacaacaattagaaaagaaattacctggtaaggcagcctttatgttgagttaaatcatttagattaaacgaaattagagatttcctatctctaagacaaagatagaggtaaacataaatttagtttttgacatttttgccttgtaacttaactgaccttagttggagataattgttaattaagcttgtggatttgggtctggatagagaaataagaacattatgcactctgctaatgcaccgttgttctaacttgtaacttgaaatctgattataaactgctaaacaaaaattatgtaaatgttatccatagaatatacagcactaaaaactgatgagtattaaggtgattgcttaataccaccagtgcagaaatagaaaatcaaatcatctactgttgttttctcatgttgttataagagaattggaaactccttaattgcaggaacctattttaaatttaatgtgaacctattttattttatttattttgttttttgagatggagtctcactctgttacccaggcaggagtggagtggcgcaatctaggctcactgcaacctccgcctcccaggttcaagtgattctcctgcctcagcctctggagtagttgggactacaggcacatgcaccacgcccggctaatttttgtatttttagtagagatggggtttcaccatgttggccaggctgatctcaaactcctgacctcaagtgatccacctacctcagcctcccaaagtgctgggattataggcgtgagtcactgtgcccagctgaacctattttaaataatactcatttacaatgataaatccatcatactattaaaatattctaaggtggctatgaattattaatgatgagatgataatgatactaagaagcaaatgaaattatggagtcttttatgataaatactttgtcagtgtcattttgctgcatttaagatgctcagcagttaattggtctggtcagaacactggctgtcccagtttattgtctaaactaaattaccttttgttcactgatgaaatactattggaaatattttacgtgcaagcctgcatgttgagcaaagaatctaaatgttaatacatggttcatactttctagaacctttaaaatatattagaggatttaagacatccatataagcaatcacttcagcagtatgtgagtgggataaattcctggagagtattatagatgcacaacagacctcacttatggttggttggtgtagactggggaagatatgaggaattaaatgtctgtggaagaggtcacagttgagttgagagttgaagatgaatagggtcaccacaagtggaagtgagaatagttcaggttttgataacaatgagaatgaaatttcaatggcagataaggacaggaatgcttggaatgcagaattttctttttctgtttttagtagacattcatttaaaattttgaacaggaagcaacattatcagagatttcatttgtgcattcattccttcaacagccgtttattatatgcctcctacatactaggaatattgccagatgctggaattaaaaagatgtatagagacttggagagttttttaaattgagatgagattcacataatacaaaatgtacagttcagaggctgtcttagtctgcttggactaccataacaaaatagcatagaccgggcagcttgaacagtgggaattttatctctcaccgttctggaggctggaagtccaagatcacggtgtgcagatttggttcccagtgagggccctcttcgtagcatgcagacagcagccttcagtttttttgctcacatgggatttccttggtttgtgcatgcagagggagacagatctctcctctctctgttttctctatctctgtctctgccttttttttttttgagacggttgtttcgctcttgttgcccaggctggagtgcaatggcgtaatctcggctcactgcagcctccgcctcctgggttctagcgattctcctgcctcaacctcccaagtagctgggactaaaggcatgtgccaccacacccagctaattttgtatttttagtagagacggaggtttcaccatgttggtcaggctggtcttgaacttttgactttaggtgatccacccaccttggcctcccaaaaagtgttgggattacaggtgtgagccactgcgctcggcagtccctgtctttttataaggatattaatttatcataagggccccactctcaacggctaattttttttgttttattttgtttttgagatggagttttgctcttgttgcccaggctggagtgcagtggcgcgatcttggctcaccacaacctccgcctcccgggttcaagcgattcttctgcctcagcctcccgagtagctgggactacaggcatgtgccataatacccaggtaattttttatttttagtagagatagggtttctccatgttggtcaggctggtcttgaactcctgacctctggtgatctgcctgcctcggcctcccaaagtgctgggattacaggcgtgagccaccgtgcctggccagctaatctaatcttaaccttccagaggctccatctccaaatatcacattagggtaattagggcttaaacatatggattttggtgaggcgacacaaacattcagttcctaacaatgacatttagtgcattcacagtgccttgcagccacaacctctcttgtcccaagatactttcctcacctcacaacaaaactccatatccatcactccctccagcccctggcaaccaccaatctgctttctgattcttgggatttacctgttgtggatatttcatataaatggaatcatatatgactgtttatgactgacatctttcacttggcacaatatttttgagattcatccaccttgcagcatgtatcattacatcatccctttctgtgggagggggactttgaatttttttttttttttttttgagacagagtctgctcgtcacccaggctggagtgcagtggcgcaatcttgtctcactgcaacctctgcctctcagctttaagcgattctcctgtctcagcctcccaagtagctggggttaaaggtgcctgccaccacacctggctaatttttttgtatttttagtagagactgggtttcaccatgttggccaggctggtatggaactcctgacctcaagtgatctgcccacctcagcctcccaaagtgctgggattacaggtgtgagccactgcacccagccaggactttgaattttaagatatcagagtagaggataccatctcctctgaaatcaccaaaggtgagcaagaaaaccaaaacatacttgcccgctttcatctctaatcgctgactacagtacgtgaaggaagtctgtctaaagcagtgaagtccaaacaggaatgtgggaagaagccaaagatggatgctcacagctgcagatctcaaggcagagtgagaagcaatggttcttagatgtggaccagggactggcatgctgcacagggtggcaatgagtgctcccctggccggcgttggtaccaaggaggattgcgtgaggccaacacagaaatgaaatagacactgctgaggacagtaagggacaaggatgatgggattgtagaaaatgaagaaataaaatggacataaagtattagaaaaaaaaggatagaactgagtaatcattctaaatttataattgatgtgttaaagaaggaaactgaataatgggttagaaaaaattgttgactgactgtgatctccatagggatcagggcacagcttgttcttcagtgtgaaaagccgaatgctcacctttcactctgctttgagaaatcttgttagaatagaggactcatcagcacggttacaaggcaaagggaaggagggagagagacagagactcatggtccagaagagagggggttaattcctagggcaagctcatgggaagaagggaaaggatggagtaacagggaaggaaaggagtctggatggtgatgtagaactgctagataaggatcttttagaaacagtgtttggcgtggaggagaagatataaacagagaggttaggcaaagggggttttcgttgtgctcattaacaaggacacagaagcttagggagttctgggtttgggtttgtactacaaatttcaaatacattggtgagttttcctttgaaaagagtccgttgaaaatcttgagttttcatagttgctgtgttccttgtctgaagtaacgtttgaagataagaagcgggagaactttgaacgtggcaacctggaactggagaaacgaaggcaagctctcctggaacagcagcgcaaggagcaggagcgcctggcccagctggagcgggcggagcaggagaggaaggagcgtgagcgccaggagcaagagcgcaaaagacaactggaactggagaagcaactggaaaagcagcgggagctagaacggcagagagaggaggagaggaggaaagaaattgagaggcgagaggtaagcaggcgagagtggagccacccggagttagtgtgcgatcaccccttttcagaattatccaagtgatctattcacgccatctttgtctttttacaattcagtagttttagtatattcccaaagttgtgcaaccatcgtccctaattccagaacattttcatcactccagctctttacccattaagcagctactccccatttctttctccctccagctcctatcattaattttactttctatctttctagatttacttattcaggacattttttataaatggaatcatcaatatatggacttttgtttctggctttcatttagcataatgttttcaaggttcatccacattgtaaaatgaatcagtcctttattcctgtttatggctgagtaatatttcgttatatgggtataccacattttttaattcattcagcagttgatggtcattgtggctattataaacaatgatgttatgaacattaatgtacaagtttttgatgatacaattttgtaacaaaccactgataccagtaaagtgtttttccagactgttttctctgtatacacctatataaaaatataaaggtttatatggcggagagtgtaagggctgtataattttttaaaaaccactgtaatagtatcataccaattacattgttctgcaatcttcttttttttttttttttttgtttgagacagagtctcgctctgtcacttccaggctggaatgcagtggcatgatctcagctcactgcaacctctgcctcctgggttcaagcgattctcctgcctcagtctcctgagtagctgggattacaggtgcccgccaccacgcccagctaatattttgtatttttagtagagatgaggtttcaccatgttggtcaggctgatctcgagctcctgacctcgggtgatccacccgcctcagcctcccaaagtgctgggattacaggcatgagccaccgcgcctggcccatgcaaccttctttttaaactcttttaaaaatatgtctgggacatcctccctatattctatggaaggcttcgtaaatttagcgccatacctggaaaggggctaagcaaatcttgtctctctttccaattttagtacattactgcagaagcaacacatggttctttcatgtgaatgaaagataaaaatgaggaatttttcgatgtaaaaaaatagcctgagtgctgtgcctcaagcctgtaatcccagcactttgggaggctaaggagggatgatcacttgaggccagtagttggaggccactgcattccagcctaggtgacagagcaagaacctgtctcaaaaaaagaaagaaacaaaacttatagccataactcctttttttttttttgagacagactctcgctctgttgcccaggctggagtgcagtggcacgatctcagttcactgcagccttcacctcctgggttcaagtgattcacctgcctcagcctccggagtagctgggattacaggcgtgagccaccatgcctggctgatttttgtatttttagtagagacagggtttcgccatgttgcccaggctggtctcgaactcctgacctcaggtgatccgcctgcctcggcctaccaaagtgctaggattacaagcgtgagccactgcgcccggccccgtaactcctttttgttcagacagacactaacaaaattttaattttcagaatgaacaaagataggcaaacttttcttcaacgtaccaaaaaaatgatattctagagtatttattcagaattatttaatagacatttaccatgtatcaggtgtagttggatgacccatgagtcagaggcaattcccatagactgtcagatgctctgatatgtactctatctagcagtcgtcagagccagtcgttggagggagcaaaagcttttgtggtaaaaaggaaatgaatgattaggaagtggggagtcgcagacttttaaaacgagttaagtaataatttctcttttggtggagtaaaatcaactcttgtttgtttttgttcaggggtgttttagtttgattttactacataaattttccttcttggcgtgtcagtaaataagaaggagcatttttagttagcacatcaagcattcttgaaggcataaagaatggaattctaatggggaaataatcctgtcatcttacgtaaatatagtattatgtaaatataatacccagttctgtgtattccctttattcccatagaaggaatactgtatttttatgtaattttttgttttctaatgtgatttcttgtaatgtttaatatttcatccctaaaaggaaagacttcctagatgccatttttgtgaaaagacattgtgtagtgtaagaactgaaaaattagtaatttgtctctgtaaatgtcacaggctgcaaaacgggaacttgaaaggcaacgacaacttgagtgggaacggaatcgaaggcaagaactactaaatcaaagaaacaaagaacaagaggacatagttgtactgaaagcaaagaaaaagactttggaatttgaattagaagctctagtgagtgaagtttggttatactttgaaaatatactaagatggaaccattaaaaacagtaataatttttattatctttcatttgttcaagaatgataaaaagcatcaactagaagggaaacttcaagatatcagatgtcgattgaccacccaaaggcaagaaattgagagcacaaacaaatctagagagttgagaattgccgaaatcacccatctacagcaacaattacaggtgaggaaatatgcctcttaaaagctattatattaaactggcatccttttctctaattcatttcatttacttacttattcagtaaacattaagcaactgtcttgtactaggcactgggaagcaaaaatgaagtagacagggtccttgtgtgaaaagtagcctgtcaaggagacaaactcagcaaatatttactgagcactgcttcgggccaggtgcttttgcagtttctgaggctacagcagggacagacactctgtcttctgggagcttaccctctgtttgcaggaggaacagagactaacaaaataaagtgtgtactgtattagaagatgaaaagtgctatggagagtgagtagggaagggaatagagagtcctagggataggaaatgttgtgattttaactaaggtagccaagacaggtctttctggatggtgacatttgagcagagacttgaaattaatgacaggctaagccatgtgggtatctggcagagcaagatctaggcagggaaatagtgccaaagtcctgaggtcgtagcaggactctgagatgccagttacagcaaggagactactgggtagagcaggtgggagctggatcacacagaacctgtagtccaccaacaggactttggctttactgtggtaattacaataaataagtacacttaagtattttagggggtcatatgagagctatatgtatactaaatagttggagacatacagagcacttttagtagttctgtcttcattttaaagcctatccaaagttgttataatatcacctggtttggtatcaagtgctgaactacaggggcatcaaattcatgtaaatattgcctgtggatgatcatatttgcctgtgattcctttatgttaggctttttctcagcatgatgtttttgagatgtgtccatgttactgagtgaatgactcttttgtttcttttcatcactgagtagtgtttccttatgtgtccattcacctactggttgatattcaggttctttccagtgtggaacttttatgaataaaactgcagtgagcatttatgtacaagtctttatgtggaaatggtttatttctcttgggtaaacttttaggaatggaactactgtgtcatgtaagtgtatatttaaccccataagaaactgtcaggctgggcacagtgggtcacacctgtaaacccaatactttgagagggcaaggtaagaggattgcttgagctcaggagtttgagaccagcctgggaaacatagcaagaccccatctctaaaaaaaaaaaaaaaaaacttaaaaattagctggcatgggggcgttcacctgtagtacctgcctgaggcaggaagaccacttgagcccacgatatcgaggctgcagtgagctatgattgagccactgactgcctgggccacagaatgagaccctgttcaaaaaaaaaaaaaaaaagagagagaaaagagaaaggaaagaaagagaactgacaaactgcaaagagtttgtaccattttacattctgatcatttaatttgtatttccctgaaggctaatgatgttgggaatcatcttacatgtttattggcgagtattttttactgtgcatcttcgttgaagtgtctgaacaaatcttttgcccattttttattgggctgtttgtcttactatttacttgtaaaagttctttttatattcttaacaagtcctttgtcagatacgtgttttgcaaatattttctcccaatctggcttgggtttaatttttgttagtggtattttttaaagggcagaagttttaaattttgatgaagttcagtttaccgttttttttcttttggtgttcatgctttttatgttctatctgagaaatctttgactaccccatgactgcaaatattttattttcttctagaagtttttggggcttaaaaaaataatttttacaagtttttataaattgaaaaaaacttaaaattttaagtttcatagttgtatcttatatgtttaggtctatgagctatttcaagttgatttttgcagatagtataaggtaaaggttgaggtttatatttttacatactgatacacagttgttatagcaccatttattaaaaacactggcttttttcccattgagttaccttggtagcttgttgaaaatcagttgaacatatttgtaatggtctattctggactctattctgttcttttgatctgtctgtcctttaccagtacctcaccctgttgatacctaatttttgaagtcaagtgatacgaattctctgttattgttctttttagaattgtttttggttattccaggtccttaacatttccatgtacattttagaatcagcttatcagtttttacaaaaatgcttggaattttgttggaattccattgaatttataaatcaatttgggaagatttgacatctcagcaatagtaaatctatggcataaatctctattttggtagttataaatttctctcagcaatgttttgtagtttgcagtgtccaagtcttgtagatactttgtaaagtttatccctaagtattttgtggcttttgatgctattgtatattgcatatttttattttagtttccagttgtttggtgccagtatatggaaatagaatttatttttgtatattgaccttatatctgtgattgcttaactaacttcctttgtgtgtcttactttgttgaccagaacctcccatactatattggatagaagtgggaagagccttgttccctctcgatgaaggaaagctctctcaccatagagtatagtgttaaccagggttcttgtaaacaccttttatcaggttgatggacttctccttttgctgagggtttttatgatgaatgggtgttgaaatagatcatatgttttttccccgcatctattgagataagtatgtgttttttctttcttattttgttaatatgatgaagtacatggttgccatttgaatgttaaatcagccttccattcttgggataaaccactcttggtcatggtatattaccctttattaaaatatttcactacattccatttcccattattttattaaggatctttttaaatctgttgaattcaattcaacagagatattggtttttagtgttcttctaatattcttgtctagttttgatatcagggtaatgctggcctcagaaaatgagttggaaaatattccttcctcctctattttctaaaagtgtttgtgttgaaatagcatttcttctttaaattttggtggcattcaccagtgaaggcctctgggcctggagctttcttgaagacttaattataaaattcattatgcagatatagggctattctgattttcttcttctccttgaatctgttttgattatctgtcaatgaacttgtttatattatctaaattattaaatttacttgtataaagttgtttataatattctctttttttttttttttttttttttttgagacggagtctcgctctgtcgcccaggctggagtgcagtggcgcaatctcggctcactgcaagctccgcctcccgggttcacgccattctcctgcctcagcctcccaagtagctgggactacaggcgcccgccactacgcccggctaattttttgtatttttagtagagacggggtttcaccgttttagccgggatggtctcgatctcctgacctcgtgatccgcccgcctcggcctcccaaagtgctgggattacaggcgtgagccaccgcgcccggcctataatattctcttattgtatgtaagtctgtagtatctgtagtgatgtctcttctttctttactgatattggtaatttgtgtcctctcactctgtctccgtgcttccttctccttttccttcctaaccccttcttctctcctttctcctactctatctctcctccttcttcttttcttgatcagtctatctggagtttgtttatttttaaaaaataagttcttggctctattgatttttttttttttagtaagcccttggctttattgattttctctgtggtatgtctgttttctgctttatttttgttctttttctcttgtttcttccatttacttatttggggtttaattttcttttctcaagcttcataaggaggaagtttagataattgattttggacctttcatcatttttgatacaaacattttaagctttaaatgtccatctaaacactgacattgccatatcccacaaatttttaatatgttgcattttcatatttattcaattcaaaatcttttttaaattttctttgtaatttcttctaattctttcacctttattgagatttatggctcagcatatgctctgtcttggggaatattctatgggcgcttgaaaagaatgtgcatgctgttgtaattaggtagagtgttccctaaatatcagttagatcaagttgattcatggtggtcttcaagtctcctgtgtcttgactgattttgtgactacttttattagctactgagagtggaacactgaaatcctgatcattgtggatttgtatatcttcctttcatttctgttcaattattgtttcatgtactttgaagtcctaagaaactccttatacatttgaaatttgagatttgtaaaggaaaaagtaccagaagttgattgctggaaattattttaaaatattacaaaatgcatgcacctttttaaagtatatttttcttttcttttttttttgagacaaagtctcactgttgcccaggctagaatgcagtggtgcgatctcggctcactgcaacctctgcttcccgagttcgagtgattctcctgcctcagcctccccggtagcagggattacaggcaagcgccaccacgcctggctaatttttatattttttgcagagatggggtttcaccatgttggccagcctggtctcaaactcctgacctcaggtgatctgcccaccttggcctaagtgtatttttctatgtgttaactctctttatgtgtcttttgttaactcttgaggtaaagtttcataaaatattctcctggaaaatttagggatgaaggccatgtgtttattaaactaagtattatcacctaatactatatgaccaagtacaatttttattaaagattgatgtttagactgttcacttattgataatatgataaaaatcaagattcccaaaaatgtaatgaagtgaaaaataaaacattctttgaagaaagaaaagtatgtagtaggtaatcagatattggttccctttctgtacagggattagcagatacttgctttggagataagtcagatctgatttgtgtattctgttttatcaagatttttttttctggtatggattattcataggagaagatgcttctaaattctagctattgagttaactctttctaccatttagacatgcattacacagagatttattccacataagccagtctgtatctaaaggtggttattccaaaatggactggtttttagcttctgatgaaaaattttaattaaggcatttttagtttttcaaacaaaaagtcaatacatagagctcattttttatcaaggtaaaaataaaagtcaaatattctttattataacctaggaaggctgccattttactgaaacatgcagaaactatacaggatattttcggctaaatttaagcagatactgttcttggcaagttaaccacaaaaattccaaacagcctgtgcagtgtggcttaacttttttcttgtgtcagttaaaaaaatagttgcttcaaaacttttgtgtacctgtttaaaattccatccagtgtggtggaaaaatatatacagcagctaagattctagttgttaaaaatctttgatttctgtttctaacttcaggtatacggtaaacctaagttcagccttagtaagtatcaaagttcaggatagagtaatagggtagctcctatttagaccactgagttagtttacaaacagtaggatcactgcatttgcatttgatcccggtgccattggaagatcattgcttcaatttatctctgtggagtagtacttaatgtacattttttgaagcttataaatatccggtaagtcaacaaaaatataagaaatatcagggaagctataactgtgtagggaaaagcatttggcaaacagagttaatttcttggaaagaaagcaggagccacacctaattaataattaaatgcagcttcaccatgcaggatttgggaagagtctgagaaaactgacttaagctctgcctggatcttaatgtagatgtggtagccttccctgtcattcattactattttcctccttccttcccaggaatctcagcaaatgcttggaagacttattccagaaaaacagatactcaatgaccaattaaaacaagttcagcagaacagtttgcacagtaggtgttttatttttaaagttgaccttttctttattctttctttttttgacatggagtctcactctgtcccccaggctggagtgcagtggcgcaatctcggccaactgtaacctccgcctcccgggttcaagattctcttgcctcagcctcccaagtagctgggactacaggtgcatgccaccacagccagctagtttttgtatttttagtagagatggggtttcactatattggccaggctggtctcgaactcctgaccccaggtgatccatccactttggttccccaaagtgctgggattacaggtgtaggccaccgcacccagccttttcttattttttaaccagcaagaatttccttaagtgaaatgagaacattaaaaaacattttcctcactgcaaattaaagtttttcttatctttgcgacgtttttctaaaataggagattcacttgttacacttaaaagagccttagaagcaaaagaactagctcggcagcacctacgagaccaactggatgaagtggagaaagaaactagatcaaaactacaggagattgatattttcaataatcagctgaaggtaactcttctatgtgtgcctgcatgtgtgtcctacctttaatttttttaactgtccaaatgattagttgctatttaatcacaggcagaaaaatttattatgccattgtgagacaatctaaattgcacttttctccttgaaaatataagaatgaatttggcatctataaattagggctgaatgagtggccccagcatgacatctatttttaacctgaatcatattttgacacatctccattcttttgtctgtttatagtcacatcaagttgattccaaaagctttatctttcttatgttctttgaatactactaaaagggattgttttcttttttaaaactaagaatttttctgccacttcttatcttcattgcgcttaaatgtagatctttattttgttacctcatttttaaatcttactgttttagtggagtaattgcttttgtctcttgtggcagaagtggtgtatggttttgtcacatttgcacagtaaaattgggaaaatgccaaaactctgaggaaatgtaaaatggttagatcacagcctttttcagatttggtgtttctgatttaactttacaactgtatcatcttaagaatgttaattcttggccgggcgtggtggctcatgcctgtaatcccagccctttgggaggccgaggcaggcggatcatgaggtcaggagatcgagaccatcctggctaacacggtgaaaccccgtctctactaaaaatacaaaaaattagccgggcatggtggtgggcgcctgtagtcccagctacttgggaggctgaggcaggagaatgatgtgaacccaggaggcggagcttgcagtaagccaagatcacgccactgcactccagcctgggtgacagagcaagactctgtctcaaaaaaaaaaggaatgttaattcttaaaatcagaacacaaacagtttatttcttataaacaatcatatactactttagatgtatgtagatattagcatttttgttattcttataagaaattggatgttatacttttttcccctccaaatatttgttttccttttctaacataaaattctttttaagccaattcagcttttgacagtgggaagaagtaaaactcctattctataattctaaaaacaaaattaaaaattagcatatttgaaacttttataatagttgacctttggattgagattctaggccaaattgtctagacatctgagtttgaggtatgtgtgctgttctttcagagtattaggtaatgatcttttctcaattgtacgattccaggaaagtgctcttaggggaaatattatttgagccaacttagtgtttttcttcactttgctttcatgcttacatggtgtgtgtttgtgtgtacactatatatgttctatattcatgcatatatgattatgtgtggtatgtcagtattggaagtacagctgtaaattaaccatctctagaataagtgcaattagaaacaaaaaaacaaaaaagaataagttcaattaaagtatgctcacattaactttcattgtcacttgtctcttttataagcaaaaaaaaaaaaaaaatagcactgttgcaaagcctatgttgctttttaatagtctcttgggatataaactgttaaatattaagctctcttctgaacccaggcagtagtccagatttgtgccttcacattgattctttttctagaaatttgactcccctaaaaaaggttcaggtattagaaaatgatactctagtgagaggcttttgataaatgtctagaagattaaataattttggtgattgaatttctgttgccattactaaagagaacacccttaatatgtggcgagtcacccctactttgtttaattgactatggctgctttcagtatcacagagtttcttacataaaggccaattttagcccccttttccactagccctttttccaaatatgcttatttttaaataagagtatttcttcttgttttttaattttaattttggctttctcttattaactttaattaatatgatgagtttaaaaaaaatcacaggtcaggtcgggtgtggtggcatgtgcctgtaatcccagcactttgggaggcaggtggatcacttgagcaagtggatcattcgagactagcctgggcaaaagggtgaagccctgtctctacaaaacacacacacacacacacacacacacacacacacacacacacactagtcaggtatggtggcatgtgcctgtagtcccagctacttgggaagctgaggtcagagaatcacttgagtctgggaggttggggctgcagtgagccatgattgtgtcactgcactcctgcctgggcaacagagtgagaccctgtctcaaaaaacaaacaaacaaaacagtaaacaaatcacaggtcagtataactatattgttttgttatttaacacgcatttggaggacttagtgaatatgttgtgttatggttattatctctagtattcctctcaaacctgataaagccaaaacaaacaattaaattggagaatcaaaagatttatagaatttgattgagacaactcagagatggatttatcatttagtctcttaagtgtcacttgcccacttttctttgttgtagccacactggaaaatgaaatactttttttgtaactttagagcatgtgtccattagcaaccatgttttcttggatgaagagataggccaggaggagccagtctcctgactcttggggtttcttcagtgcccctcttgatcggcagtgcctttagagcatccacgctgttgatgcaaaaattacttctgccttcctgggatgtgtcatttcacacatctaacctgatagtgtgaatttgttgtatcctaaaccttcctttccctaaaggaagccagctggagagtacagaaaagaaattagggcttcctgttcttttgtatttcatgttcacgtagattgttcacctggaagaaggaaatgcagttccctcattataggttagtactgtaacactggaggaataccttacagagtacagaattttaaaattagttgatcaggatactaaatctatattaagtggctggctccacaaatgaggataacatttaacaaaaattgattctcactattttgggtaaattgcaataagtcattcacctactttgatgcatgctcagagttatgtccagtttcttaggtataaaggtaatacagggaataatcgtaccctggttcagcccagattctgagttataagacagtgattaggaagtataggaagcgtatttagtcaaaaaactaaatacacttatactttccttttcttttaacatacaatctgatttagttctttctctagaatgtcttgctcagattaatttgtcttttgtgggtttctcccattttcttcagttcaggaagaattccttccttccctacccaaaatctgataagcaaagatagaaattctcaaagcattaattaaagaggaaaaagttacaggttaacaggtatttgtctcgtataggaagcaacctgttgaaaacataaggcatacttataatcgtgatcttctgttaaatggctccatattcaaagtcgtgggcctttaagtttctacctaatccatggaaattgaaggctcattttttgttttccaaaaaaggctgtttttccatgcgttttaatagatatttaccttttaggtgtcatatttatatattcaaaaaaagatcctaagatgtaaatatctttctatttaccacccaaaccaataattacttgagaaaggaaacaggaatcttactgtagcaaataaactttgcttttgggttttaaataagtctgtaaaaacagggagggtgggagaagaggagaaacgatagcaccctgaaatattgaagctcttatcctacaaattccccaattggcagcctttgtacttatgctgcccttgctatgcatgataaattttaggtttttgattatcaaatgaaatatttgaacagtgaattaaccaggaataattaattttgttgtgattattgctagcatgaattagtacatcttaaaatagttttaattcagtgggtaaaatttatttaccattaatttctgcttttaaaatgtgttctgtatgtaacaaataccttattaagaaatcggtagtcttctcagatccacgttctagaaacaacaatttaaaattattatctatgacttctacttcagtttacatgaaaattaaaactcccaacttttttggagactctgtgtaccaaaagggtagtttttcttacacacagtgcttacctataggcataaaattatgattcaaacaagtgttaaataacattactgctaggactttttggacagtagcacctgactttaccttgaccttggcgatgtcagtagttactgtagcagttttccttggcactgacagcctaatgttccatattttaatgtcttagctctaagatggagcagcagcacaaagtacagcttgtagttttccaggctcctttaagaggtcaaataaggagaatccaacacccaacggagctagattttatgtttcatgttgaaaagttgagtccttgttggttcctgtctagtcagtgtgtactggacaagtcctaatgtgaatggccgtttacatttgagcatttctttcttccagtcagtggcaatggaggaggcagtgttgcagtgcctggcagttctcctgggctgcgtcatccacttagacttctttctaaaggtctccatgccctactcaggcaatgcacatctttctcagactaagaatgatgaaccatctccagctctgtgcttcagtttcccctgcgcagatgagtgctcagtgtctaagatagcatttaccatgaagtactaagccttctttataaaagttaattactagttattattaatcgtggagtatgattgattctttcctattgacgagttgcgtgtgtgtatggtggtgtaaactgaattacaggctggacaaggtactgtatactgtagtcttgtctttttaacaagcattttagatcattgaatttgagcttgtctgcaaaaatgtgaaagcgctcagttgttatttgggtcatgtgcatgtttccatcatgggagacatactgtgatcagtatactattccaaatgtgtatagcattttattttctagcaaagtttgaatatttaagactaattcacaattatgatttaattccttagtatacttgggaaatccaggcttctaaaattagacacaagaggctgttagaaatataaattctccccataatgctacctgttctaaaaattgctcttagaaccgaatcgatgttgaaatgagaaggccagttgtagtaaatgaggttgtttgcttaactaaagcctttatactcttggtttcagacactagctttcatgggaggctcattcattatgaaggcagtgaaaggcaaaatgtttagcaaccagaggaaaaaagaaaagagctggagaaagaactgcagaacagagtaagaagtcagggaaaaaaatgcttgtgaagggaaacaatgaaggaaggagaaagactcagaaagaggaggcacagagacagtgagagaaatcagtatgaattcaaatagccatgttgctttgtcataattagtagaataatgtttggttctttcattctgttcaagctaaaattttatttttacctatatgatcctttggaaaagacctcttatgcacagaagtaataaagtgctctaactctcattctgtcagattctgtgccataccagtaggctgcttggttgagttttttagttacagcatgggttttttttctttttaaggttgtaaaaatttaataaaagataatttgggaaagggttaagaagaactcagtcttttgaaaaaatactttcttctcttaatggaatattgctttgtgactgaagcagacactttgagggaaattcagattttcaggacaaaatggaatcagttttctctttctggtaatgcttcccaagggtacttcccaaagcctcatggcagagggtgtctgattacctattactattgcagagaggacaagagcttctagctcttctgcccacctccttccacacacacaccttgctccaatctcccttagcacttgtgacacattgactaccattttgtgccatgggaaatagtcttattattttgttaaatactgacttcaaatttaaatttttgaacatgttttcaaacagtatatcccatttcagaatttaaataaccagtcaggccaggtgcagtggctcatgcctataatcctaacactttgggagttcgaggcgagtggatcacttgaggtcaggagtttgagaccagcctggccaacatggcaaaatcctgtctctactaaaaatacaaaaattggctgggtgtggtggcatgcacctgtaatcccagctgctcgggaggctgaggcaggagaatcacttgaacttcatcacggcagaggatgcagagagccaagatcatgccactgcatcccagcctgggcaacagagcaagactccatctcaaataaataaataaatgaataaccaatcagtatatatttttctgtatagtcctctcagttttaatgcatcgagaatgaataaatgtagcctggtacagtgacatatatctcaggaggctgaggtgggaggatcacatgaagccagacgttcaaggctatgatcgtgcctgtgagtagccgctgtactccagcctggacaacacatgtctctaaataaataaattttttaaatgaatgaataaatttataattttatgataaatgggctatcagtttaccttgatttgggtatagtttctgtgttctgaaatcgttatttttcaaaattttccatacaggcacaagttctcacctcatggggtttgttaactggccttctttaatagctcttcatttgtttcacaaccacttaatttgaaaaagttaatgtattttaaaactccaaaggccttctataaattttgataccgtatactacatattatccctaggtgagaaataatgtttatttacagaaaagcacttctactttggactttttatggatgtgatattatagataaacacctgaaatttctgatgctggtagctacatcattttttaatgaggtcaatttaatattaacagtatgaagattattataaatgttatatgtgagctaaataattttatcttgatttatggttttgagttcatgaaatttaagtaattaagttatgtttgtttttgtctctcatttccaagagacatcctgaggcgaaccaaaagcaaaatccttcaaaaaagttaaatatctaaatcagtaaatacatttccattaactgctggtctcctttcatagacccctgttgctatttttttctcttcatatacattatgcaaagtaatgtttgtgaaaaggaatcctatatattgttcaggcgcatgctactttatatttcaagtaatattgtttcacataatacatgtatttttgagtgtctctaagaccagatgaaggagaaacagtcacagttattaaatcaagtgattctgtgccttttagcttagcaatagaacaaacttcttcagtaaacctgagccacatttctcaggggaaaaatagttggattttcttgggtattcaatttgtcaaacagattgcttttgaaatactttggctctgtgccataggatgtccaaagatgttttatggttcaaatatcttagttctttaggggaaataagtgacttttccctctttggtctagggaagaaaattaaaagcaagttgattttcgtttatcttaactaatacaaaacagaatcttgatatgccagtaatttgttattgtggttcatgagctgtgcttgatcaaagaccccttgagactaataaaagctgtgagctttctccaccagaaaaatgcccatataccccaagtctgcatgcaacatagtatccacagggctgaagcttattcatggaacctggttaagaaactctgtattttcatgattctgcataaattgtgattttttaaaaaaaacttattttaatatttaatattaatatttaatatatgtgtgtagtatatatactacacattttatagttttattttttctgcataagtatttgttacatgcagctacaatttcttgactacttaataatttcttatttaagaaagtactgtaattatgttttattggaagataatatcaaattattacatactctacctagtgtaaaacatgtcatacacttgaatagaattcataaaagaaaaatcaacaaagttgtacactccgtactatattgctagattaatatccatccaagaaacaagtttttgtagaattactggttttagaaaaaaaaatcacttaactttaggaagaaccgagtgagatactgacttttgattcgtggtaatttgtttgttttctttctgttataatagcaaaataactgtgacaaattccatgtggatttaatagaatttgcagggtcatttaaatcaagttgcctaccaggaaatgttgatactttcagtgtggtgaaattttccttagccatttcccccaataatttgctcatttcctagatatgtaatttaatggcactagatttgtttgtcactttgaatttttttctttctgaaggagttaaaaggatacttcttaataactgtaactgtacttgagtctctttaatagtatggagaagaatgagagaatagtgtagccatctgctcccctatgtgaaaggactgggtattctacaaggactttgttctggcaaaggaaggagagtcattcactcatttttttaagagtatatatttcttcattctatagattgccttctcggaagttcaactttttaaaaagcttatcaacttagaaatcatccatgttctgcttatgttgattcatgccatagtaaactctttaagtccaagaaaagagaagacccagaatgcctgcctctgggcagcatgttgatttccttacaactgtgtatctcagcagtgtttgacttggatgaaggaaatgatagaaaaactttgccatcttgaaatctggatcataaggtgccagagccttctgttagcttatttgtcgtctgttattttatggttcctgcaagctccattccttggaggtgcttgaaactgcaacttacataatcagttcctaagatcggttcaaatactgctatactcaaaaacaagtgtgtttaaaaaatttaagtatcttttttcatgtatttgatacatttaaaaattatttttgaaactgtgtcataggtaggttttttttctgtagattcttcaaaatcactttttcttacaagcttttcaattttatagtctctcctaatgtattactagctttacttaaatccggtaatcaatgatctataaatccatatccagttacaagagcctagtatagaaaggaaatgtgcggtataattcttggggaaaaatgaaaaatcttcatttgtgcctatgggctatctattatagtatgttgatacatcatggccagtgtccattctggttgtgcagtacctgttgttgaatattttgaatatcactcatgaatacattttttcctggatgaaataaggacttttctttatttaatatataatcagattcctgaacatcaagctgaaatgttatttctcttccggcatttcttactcctttgtagggtttaatttcagctcagggttattttgcttatgcttttttcacttattcttgcagttaagaataaaattctaaataaaacagatactgaaataaataaatactttatttgtttgttagacattgtgatgaacaatgtctaagatttatcagatcccaaaactagaagaacacctaaagatcatccattctgattcatctgccagctcatatcagggacctgagattagaatcctggtttcttgattcccagttctgtaccttttttattttttatttttttgagaccgattcttgccttgtcacccaggctagagtgcagtggcgcgatcttggctcactgcaagctccgcctcctgggttctcgccattctcctgcctcagcctcccgagtagctgggactgcaggcgcctgccaccatgcccggctaattttttgtatttttagtagagacggggtttctccgtgttagccatggtggcgtaacttttaagtatagtcttttgctgtaaattattttttctgaacctatttaagaatttgatggtcttgaaaatgaaattttcattcatattattactgattatttattcttgattccaggttactatgaaaaccagtactactgattttttaacacattaaaattaagttttacatcccttggtatggcagtgagaaagatgatgaaaaatggacttctttctccctagggttgattttctgatctcagcactttaaacagtcagtgtgaggctgcatcattgctttccagtcttagccttcttttccccttccctctgttccacatgtcaggtctgctgccatagggaacagtccaatttgtgccttacaaaggtaccttttcctgctgtgtcctgcctggatgttcccagtgtcatctgctaggttccctactgaagccccttcttcctttctttttcctccttcccccttccttcctttccttttttccttcttcccttcttctccattttccccttccccttttcctccagtaccttcctcttcctaagtacctccccccagacccctatctccagttaaactttttcttttatctcattgttcttttaaagcctctcagcgtcacttacagtttataaaacatttgtgtatggattttaactttaaccttagcaaaattagtaggaaaaggttagcctaacccttaggatttttttccaataacaagtgcattttaatactgactttctacagacaaaccgtctacctttgttgttcaatctctgaatgaatctaaaggtaggaattttagggcctggaagaaacctacctgcccatctagtcttgccagtgagaaaggtgatagaagacgacagggcaaatcttagtccttaactctccccatagagatccctgggccatgtactgggaggaccagccctggttagatcaagaaatcagctggaaagataccttggctctactgggcactttgactcatctgatttatcgctggcccacataagacgagtttcagtgactcaatctattggtgaccatttgatttctatggaatcagggagtttcttcctcagcagacgtttccttattcttcctattttcaggtgtctaaacttgtgacttgagtactttaaatatcatagaatgcattttattttcagtagcctgctaaggaaattactgctattcctgcagctagtagtatcaagtgaggaaattggatccaaggtattcatcatcaaattatagctttttacttttaacctgattgctggtttagtttggggcagttagcgacttgaaggatagatttagtaagaaaagatgctctggaagaggagcaacttgaagaaaaatagaccctggggggaagaattgaggtcaaagaattgaggagcaaagagatgtccatttgttctaaggcagcttagtgaaaggtggaggtgaggtttgaatggaggtagtcagtgaagaagaggcatctgtattttcaaagccagtaaaggttggtgttgattgataatcaaaagaagcttaagttttattcatgatcatcgtcatatcttggaactggttacgttccattatgattgctgagcctttagcagcagagctcacctcctgcccttcgctagcaggtttcttctagagcagatcatggaaaatggtataatgtgtatggctcattagaatgtaatcttaagtggcctttggaaatcagtcatgtcaaaatgtggtgtgattctagctttccaagttgactttttccaactctgaaacgttatctcctaagtgtcctaggcttcccactatgaaatgttgcatgctgataaatagttgatgtacctgtcactcatgtcgctacatgaactgtttctcggttaattataggaactaagagaaatacacaataagcaacaactccagaagcaaaagtccatggaggctgaacgactgaaacagaaagaacaagaacgaaagatcatagaattagaaaaacaaaaagaagaagcccaaaggtgagtcttctttggattgtggactcatctggaaggaactttgaggatttactattctttgcttggcttctccaagtagttactgcaccagaaagagccttcagtctttagtgtgcatgtgaagtgtgagtgcaaacacaaacacgtgtatatatgaatctttgcatgtatcagtaccctctgaagtttttggttggttcccagagctctctcaagctactactatgtagataaatggaattatacaaggaaattgggacacttggtgtgctcatttgcatgctaatggccagttcacagccttttactaacagctaacaggggttggagtgcctggtttaaaatccaagccactgagctagtgccccacacagggcttctccagcagggtcagggtgggcctcttctgtttttcaactgcaaattaaactttagtacaaaagggggaaatttgccaccgctgcttagtgtgtaggatacagacatgtttttatctgtttttgtttgaagatttatttgtgatatttttatttttacttgtaacttactgtagtaaattgtagaaatttgtgtctgattttgttactgggtatttgccttttaaatgtcagttaattttagactccacgaaacaaaaatgaccaaatgtcccaatgacagccccgtaaattataaaagttggtaattgaaattagattaaggccaggcatggtggctcacacctgtaatcccagcactttgggaggccgaggtgggcggatcacgaggtcaagatattaggaccatcctggccaacatggtgaaaccctgttctattaaaaatgcaaaaaattagctgggcacggtggcacgcgcctgtagtcccagctacttgggaggctgaggcaggaggatcacttgaacccgggaggcggaggttgcagtgagctgagatcatgccactgcactccagcctggcaacagagcaagactctgtctcaagaaattagattaaaaaggcgaagaaacggatacttgaggcaagtcattgactttagtgggctgagttcagttaacctgccaagagctgtgcatactttcttatgggtatatagagtcttctgtttgtttttcagtgccagtggggaggtatctggggtcccagaccaatttacaggattgttttatggttttcttgggggtcagactaaggatctcctccttggatgttgattaactccatccttttcttacccccagagtttataaaatgcttttattattcacactataccacactgaactgttaaattcctacagtgtagaaataaacataaaatacagaaaaatacataaaatagcataatacagaaaatagcataaaaatataatatggaatatgtattccaattatatagataaaaactgcaaattaacgtcagaaattagatggttatacagtatatatggtgaccttcattggtagaaaatataaagtaattcttttttttttttttttaattttttattttttgagacggagtctcgctctgtcacccaggctggagtgcagtggcacgatctcggctcactgcaacctccgcctcccaggttcaaccgactctcctgcctcagcttcccaagtagctgggactacaggtgtgtgctaccacgcccagctaatttttatattattagtagagatggggtttcaccatgttggtctagaactcctggctggtctagaactcctgacctcgtgatctgccctcctcagcctcccaaagtgctgggattacaggcatgagccaccgcgcctggccactgtttttattatggtttttttgttgtcatgaataaccatatccttacccctccaaaaaatgtttttatactttcttaaaagacattttaaaaattgtaaataaaatgtttaagatttaagtttaaagacttctgcattaaaatatcacattcatacagagtagaaataaatgtaattttttgacaatggagaataaaagtataatttgtttcaattatgttcccgtggcagattcctaattctagccgatgacctgtgtgcgttagccatgtcacaggatggcagttcagggtggagactctgggaccaggctgcctgggattgaagcccatgcatgtatggctgtgtgacgtggacaagtcatttaatatctctgccccagcttcctcatttgtaaaataggagtaatactaggactaccaacctgattcgcagtttaaaggagttaatatatggggagctagttattattatgtcatttgttattacatattagtttcatttaaagtattttctgactttataaagtattatggaatgagaaaaatcattctcagtcttttactgtgggtttcaggttgaggccatcaaaaatttcaaggcctagatttaattacaattatctatttgtggtagctactttgaaaaacaaaatcaaagtagttgaagtcaataaaacaatcccttgctttcaacttcaggtttggggagcaatgtgtgtgcatgtaaatgtgttgttccctttgctggggggaaatttttacagtgttgggtgtattttatttttatagaagttatgttctctgtgttttatggctttgtttgtttgttttgtcagtttaataccagctttattattaagaagtatttttcttattcttgtaaccactttgtaaaatacatcagaaattttctgtgttttcctaaatcatgtgatttcttctcattcagaactggagccctgattcagttgccccatctgaacaacaatgttcccttgatgttcccatcccatttactggatggagctttttttgtgaaaagaggcaacagtagtgttaacttagagttgctttcttgctgtaatcaagcgtgtttgttggcagacgagctcaggaaagggacaagcagtggctggagcatgtgcagcaggaggacgagcatcagagaccaagaaaactccacgaagaggaaaaactgaaaagggaggagagtgtcaaaaagaaggatggcgaggaaaaaggcaaacaggaagcacaagacaagctgggtcggcttttccatcaacaccaagaaccagctaagccagctgtccaggcaccctggtccactgcaggtattagaagccaaaaataattatagaaaataagtcatcttctctcccagagcctcctgaaaaatgcccctatctcatcagtacctgtcttggctacattaacagatgagaacgtcagtctcttattttgagcatggccagctcttctttccccagggtcatttgagatctgtgtaattctcccaccaccatgccagcctctggcccacgttacactggcatccacgagtcctctacggagctaacaagtggcgtgaagttccagtggtcttatatgctgcaaaagaacctgctgtttctctggtttgttatttccctccctggaatttctgagctgtttctgcaacagaaagtggcacctttcacccttgcctccactgatggggcattcgctgtcttcggtctgcattgcataaaactgcttttactttttgaaaaatgtaaaagcataatttgccttttctttacttctcttttctttcttctctttccttttcttttttctttgagacagtgtctcactctgtcgcctaggctagagtgcagtggcacactcatagttaaatgcagcttcaaactcttgggttcaagcaatcctcctgtcttagcctctcaaggagctgagactataggcatgcaccaccatgcccagctaattttttttttttttgtagagatggggggtctcactttgttgtccaggttggtcttgaactcctggcctcaggcgatcctcccaccttggcctttcagagtactgaaattacaagcatgagccaccatgcctagcctaatttgccttttttttttaaaaaagggataaatgaaagactgaacaaaaagataaatgaaagaccaatctaatcggaatagctagaaaaagctatcctttataatatctgatgtgagctagaatgtatttaagattcttgtgtggttgtgtgattgtacagttttgcaaataatgttcagtggaagcaagtcattgctttttctttgtgtggtaaattataccagttttgcttggtcatccatgtgcttctttagtgcttcagtatacagaaagaaaagaaagaaaaaacactttcaagctattctgtaaaggtttactggtccccagctacatagtgggcagagatgggcgtgaggtatggagttgcattaggcacctacctgccttcagatgcatgcagtccaggggaaagactggcaggtcatcagacctacagagtagcaaccatgtcataggaggggcaaattaattttttgatagttttttttttaatctgaaaataatttcaccattgatcttaggaagttagtttaagttcttcatgcgtcctcctagtataagatgaggatttatttttccccttcagtcagtaggaaatcttgcatgtcatacagttcaaaatcatgtggagataatacttccccctcgttgcttttcagataagataggtatatgtcaaaatacttgtagctcttgagtaaaaatgcccaaaggtctgttactagtttttgctaaccagaatccaaaatatcctccgctcatgtgcatttttaaacattttatttcatgtaaaatctaaattattttcatctaggtttcatccttaggctaattatttcccaaagaaatgtagaggaagagtgtcttcatcggggattatcagtataaccaaaatcagcacttagtttttatatgaccaggttaaagagcctaaaacatctgcattttcatgtttcagtatggaaactggtgcctctgttccctcccaaacaagttgactccttggctgattcagactttgggtcatatcctaactgctacattgtactcaacacactgggtagggaggagggcgggtattgatgctttacagatctgcactgctggagcccaaggaaagaggcagagacaagggacctttaggcagcctcgccgcacccaggcttggagtgacctttgtttagagagagtcactaatgaactctctcatgggtttttgttgctgacgtcagatttggctgtgctttggcattcagtatgtgtttcagaaattccttgaatggagggaaatagttcagaggttaagataggcaatagaggagaggttagttgtttggcttgttgtcatacatttgtgttctctgtaattatttatttttgtcccccccacctttttttgtaaacagaaaaaggtccacttaccatttctgcacaggaaaatgtaaaagtggtgtattaccgggcactgtacccctttgaatccagaagccatgatgaaatcactatccagccaggagacatagtcatggtaagaaagactccagtgagagggtcatttctgttgaagattagcctctgtcctctttttttcactttattcaacaattgtgagattgtcagtgagtatgaaacccaataatccagcatctagatttttaaagtataagctcaatcttctttcttttctattaaaatgaaagatggcatttaaaaaaatgtatcctaacatcattttaaaattgagttgataaagacagtgtgttcttatttttaaatctataaatgtctgataatttcagagtttagattactacttatatactatgagtatacatatatatgtaatacatatattttatatatgatgtatagacaatatatatactagtgtgcgtgtgtatatatatgtgtatgtataatatatactagtgtgcgtgtgtgtatatatgtacacatatatatacacacacaaaaggatcctccaaggtggaaggaggccaggagtctttaagaaatagttataagtgcaaaacactctatcaaatcattctcataattgcaataacttttgtatctttgcatcaaagcatcttttttccctttaattatgtgaacttttaattatgtaaaaagagtaatgaattatacagttaatctgctttcctactttgtaacagaaaatagtttagaattttgctttgttattgtttctttccttgaactaataatcattttatgatgtgactaaaactataggaaccagtttaagaaagaaaatcagacatggttgatctaaatcattttctaaaagaaaatagtagttccttgttctagttactctctttagagtcttagaagtagtcaactctgcattactcttaacattttttttttttttaaagataatttagattttttttttgttgtggttgacacaagttctcactctgttgcccaggctggagtgcagtggtgtgatattggctcactgcaacctctgcctccctgcaacctctgcctccctgcaacctctgcctccctgcaacctctgcctcccgggctcaagcaaagcgattctcccacctcatcctcccaactagctggaaccacaggcgtgcaccaccatgcccagctaatttttgtaatttttatagagatagggtttctccgtgttgcccaggctggtcttgaattgcctgggctcaaacgatcctcccaggtcagcctcccaaagtgctgaaattacaggcatgagccaccatgcctggcctagaatttgtaaagaactgtgaaagttaacaattgaaacaaacatgtttcttacccaaggactgtatgtctttgaagtataaagggtggtgtacaggtgattttactattactcatgcattcatcttgccatatacacatcatatctgtggatctttaataggctaaaatacctagaaataacaatatgtttggcacttagagaaatgaattcctgtgtccccttttttcctaatagctgctttctctgtaattaccatgggctagaagaagcaaggccaaacatcccaaattattttttcttttttttgagacagggtctcactctgtcacctaggccagagtgcagtggcatgatcttggctcactgcagtttccacctcccaggctcaagtgatcctcctgcctcagcctcctgagtagctcagaggcgtgtgccaccacaccgagctaatttttatttttttacattttgtagagacagagtctccctatgttgcccaggctccagatctttaaaagttaaaatcaccttaacagtagcaaaaacctcttcaagtatactccatggcttcattcagcacacagttattgactgaaacatgctgggtgccagccttactcatcctttacagaaagaactgttggtttgggcatgccactctgtacacacaaatggtaacttgagccagcggggtgtgtttctgtcagctttcctctgacttcaccacctgctgtttcctacaccgtggtttctgatagcctgaagctactttactcatactgcctcatatttgaagtagtgtatcctgtaaagcagattaattgtaaaatatgtaaacaccatataataggaatctaaaatttctgaaaatacaatgtcacatcagtgaggacctcattacaattttttttttaatgttaaacaaaccagcctaatatttttgaaactggattttgttgcaacacaaggtgcagagaagcagctcgctctcatcctaaagtaagggaatgttatgaaatgtgatgatgaggaaatgttgcaggtgatctgtatcttaatgagaaagtgttgctctttttcgggaacatatctgggcttcacttgtaatcctaggcctgttgaaaccttttcctcgaattggctagttaaccaccagcttgatgagatgcgtagagtttagatatgctgtaagaataaagcatgtcattaaacatatattttgccttgctttcaaacctttgctttcctggtggaggttaaaggggaatgggtaagtgttgcctaactgtcaggaagtctgcatcttattcaatgttttgtccttttaagtcacttgaattctgtgtaagtacacgtatctctgggtgttgttgcggcagtaaaaatgtgtttgagtctgtgtagtaggttgtgctttttaaaaaaaaagtaagtcgtaagtcttctcagtttgtgtactgggtttctttttgttagattccttttaaggactaacttgaatgctctgtgtttggcaagggattaggtcaagtctccatctcaggccatagacaaaaaggagttccaagtagattaaacataaaagataaaattctgggaaaaaaatttttttaagcagactattggaataattttctggctaagaaaggccttttgaagctataaaaaccagaagtcgttaagaggcaaaaatggacagtcaacaatatgcaaaaattaaaatgtctatgtttcaaaatatatgagaccaagggttacataaagggttacccctgttacataaagattccgaacagttcactttgaaagacacccacaagccttaaacaattggcagagggtgggaagggacattcacagatgaagtaaaaagtcagttatttaaaaaatacatgaaaagatgcttagcttcttgggtgatcagaaaaatgcaagttataaaacaaaatagcattgttcctctgtcaaatgagcaagtttaaaagtctggtaatatccagctttgtcaagagtataggacagtggatataatatacattgttagcatggttgtataaattggttaagcgatttggaaggcaatttggcagtgcctgtttagatttaaaattctcgttccctctgccccagaaattctatttttctccttcctctcattcttctccttcctcttttgggcacatgcacaaatatgtgtgtacatggatgttcactgcagtggtgttggtaaaagcaaataaacagcccaatgtccatcagtaaagggatggcttaaataaattatgatacagctaaaaaatacaatgaagattaaaacttatgtagatcacatatacacataagatttccatcaaaaaagcagaatatgtgcagcataattgcattttggttcgaaataaaactatatatgtattcatgtgtttatgtatagttaacagttttgaaatatatatatcaaactgttaacaatggttaccactgggcagtaaagaaggggctttcgtgttgaattttatagacttctatgttattttcatttttataaatgtatctaatttgtaatttttaataaaacaaaataaattcaaggacaagtatattagagagtatctactcaggactgtaataatgtttattatatctcagacctcccaaatatgtaatgaaatgtagaatgtactactaggcataattcgttggcttgcagaagggacagcagtgtttcgattttgtactacaaaatgcattgtgatactccaggtgccattcagctgtgttatctttgtgaggataacagtcaatgcaaaaagatagatattgacatctaatagcaacaggtttgtatttttttaatttcatgaattttgcagttaacaaatgatgagcatgagacatgtagtacaacattactgtcagtctccctaggttgaaaaatccggggttcacttatacttttgtgggcacagtcatcagattctcagattcctcaaacgtctttgggacatagcttactataatatgttcgatttttagaagtctaacattgtgacagtgttttttaatgtaggcagtcttagccttaaaaatattttgtttttagaaaaacttagcctggttttatccaaaactataatttttcatgtttaacaaaaatttaatgtggtaccttgtatatagcactattctcagcactgtagataatagaaaattatcaagtctgccattcatatgtttaaaatctttttagaaaaatctagagaaacacatgaaaaggccaacatgtgatgaagttctcaataaacattcactaactctgctaggaatttaaaagaggagaggaatcagtgtaaagtgatgtgctcagggaagaccaaatgctttcaattgagtctgaccttgatggctaaggcttagatgcgtagaaaatacatggcctctcttgatctggaactcccaatacttggagggtgaattaaatcaaatttgacatccgtaacatgttagtagaacataagaaatgagaagacctatgctcactgctgttttgttgaagtttatcttgagaacacaggctgagtgtctaaatcagtacaatcttttggctttcatgggccacattgcaagaattgtcttaggctgcacataaaatacactaacactaataatagctgatgaacttcaaaaaaaagcttgcaaaaaaaactcataatgttttaagaaagcttacgaatttgtgttgggcctcattaaaagctgtcctgggccacatgcagccagtgggttgcgggttggacaagcttggtttaaatgcttatccttggactggtacaggcctgaatgcatccagattgctgagggagcttccaaaaaataaccatgccagggctcatccccagagattctgagaactctactgcatatacagccttcagaagtctgaccaggtggttctgttaggtagtcaatttcaggaaccgctgatctaacctaatctctttttcacgtcaggactaatcctaaatcatttctagaaaatatcctcttaaaaatatccaaagaagaatggacttctttagtagttatcagtcattagccagtcagttcattctggaaattgtttgtcttagtgttactcttataacaatttttaactcattcttttccttttcttctcctgacagacatttttttaaatgtagccaacaatacctttttcctctaccttccatagatttccatagattaaacatcagaaagtatctcatttagtaacaactggccataatatcactgcagttttgagggaccagtatacacgattacagggttggctcaaatctggcccaatcactgcctgttttataataaagttttattggaacacagccaggctccttcattcacatattgtgtgctacagtggcggatttgagtagttgcaacagaggtgaaatttgccagcctccaggttggagctttagaaagagtttttttgtttgtttattttttgtttttgagacggagtctctctctgtcgcccaggctggagtgcagtggcgcgatctcggttccctgcaagctccgcctcccgggttcacgccattctcctgcctcagcctcccgagtagctaggactacaggcacccgccaccacgcccggctaatttttttgtatttttagtagagatggggtttcaccgtgttagccaggatggtctcaatctcctgacctcagaaagagttttaaggccgggcgcggtggctcacgcctgtaatcccagcactttgggaggccgatgtgggcggatcacaaggtcaggagattgagaccatcctggctaacacggtgaaaccccgtctctactaaaaatacaaaaaaaaaaaaaattagccgggcatagtggcgggcgcctgtagtcccagctactcgggaggctgaggcaggagaatggcatgaacccgggaggcggagcttgcagtgagccgagatcgcgccactgcactccagcctgggcaacagagtgagaatccttccaaaaaacaaagacttttaatatcctcatctaggaatttggggagaaaccttatatttcaaaaccggcaaatccatggaaaatgttttactacctgcactcctcaacacatcccatgcagccactgtcagctggtctgaatacacaggctaaacctgtttgctacacttgtttatcatgttctatgaggggaaaaaggaatttctgcttcccccctttgtgacaaggtcagagattttagaaatattaatcttacctaatgaagatggcagccatggagcatataaaaattgagaaaagaggtgtaatatcatcggcctttgccaaacggacttgaagctgaagtggctgctgtgtatatttgactgttgcatcagcgagctacaatatgcagtgtgtaattactaacatttagtagagcagctctgtaacatagtcccagaaatgtgagcaatatctggtgtttgtacttcgcttaaatgatgtttcactagaattacccccaaatacgttggggtgttacagtgtgcctgataaatgaaattgtattgagaccaaaattgttaataataacatctcccttatagcccccagtaggtaaatgtacattgtgtaaaagtccacgttggaaccagtcatattacaaagcagtttgtgttcctatttcttggtctgccataatcttatgttttccaaaattggattggcattttgggtagttttccaaatccaagaagaaatatttttcattttcatatgttgacctttgtgccctttctaagtggttaatttaatttaggtgttaagaatgaaagtctcttacagcccctgaaccttaaaatgtaataatttattaaaattgatgtatacttgtaagagtaaattaagctaattgagactattgtttggggggctgttgagaccaacagatttctttgcttaaaagtgaaatgctgatttcactgttatccttagggatgggagaagctcttgcttaaggggataagaggctgatatggccccctccttcactcctaggtgtacactgcaccagcaggctttctatcacatctgaggacaggctgggtgttatcagtttactggagggggaggacatttccccagggcttcaggtcgcattccagatgtccaccagtgtctcgctctgttactcaggctgagtgcagtggtgtgattttggctcactgcaacctccgcctcccgggttcaagcagttgtcctgcctcagcctcccaagtagctggaattacaggcatgtgccaccacgcccggctaatttttgtattttttgtagagatggggtttcaccagcctgaaactcctgacctcaagtgttccatccaccttggcttccagaagtgctgggattacaggagtgagccactgcacctggcctaaaagtcttattaaccagtcaataccctgtgtttcaagggagtaacaatagatcatgggacataattaagcaaagcagctgacctttgaggaggtccaaaatgagcagacgagtaggagttcccgtcgatcaagggatccacttgagcccctaaaggattgcttatggcaagaaggtaaacctagagggagcagaggaccaggcagttagagcagggaactcctgaacagagaagcagattgttacctagagtgaaggtaaagtcaagaccaggcttttggccgggcgcggtggctcacgcctgtaatcccagcactttgggaggccgaggcgggtggatcatgaggtcaggagatcgagaccatcctggctaacaaggtgaaaccccgtctctactaaaaatacaaaaaaaattagccgggcgcggtggcgggcgcctgtagtcccagctactcgggaggctgaggcaggagaatggcatgaacccgggaagcggagcttgcagtgagccgagattgcgccactgcagtccgcagtcccacctgggcgacagagcgagactccgtctcaaaaaaaaaaaaagaccaggcttttagaataggacagaagcccaagtaggagaactacagcgcaacatcagagctggacagcagaagagagaatttaaaaaaaatatctggcctggcacggtggctcacgcctgtaatcccagaactttgggaggcctaggcgggcagatcacctgaggtcaggagttcgagaccagcctggccaatatggtgaaaccccatgtctactaaaaatacagaaattagccaggcgtggtggtgggcacctgtaatcccagctactcaggaggctgaggcaggagaattgcttgaacccaggaggcagaggttgcagtgagctgagattgtgccagtgtactctagcctgggtgacaagagtgagactccatctcaaaaaaaaaaaaaagctaacacttttagtatgccaggcattggtgtaaatatttgtcagtcctcacagtgagcattataataagacaggtatttttattatccccattttacagatgaagaaacaggtgccacgagattaaacttgcccaaagtcaaccagttaatagattgtagaactagctcctaaattgagacggtctaactgcagagccctattcttgatcattacactttgcagtcttgacactaagttattgtgtgtttggctcaagctcctaacccactcctgcctgacatcacctttggtcctagaaccaaggtggctgatcttgactattgaacctactgagaagtctggcaggacctggcttggatagagacagctatgtttccagtgtggagcaaagttataatgtgtcaccatatcaccaaaatgtaaacaaggaaggaaagacatctagccatttgagttcagcataaaagaagatccaaatgggggaaaatttatcttaaatcctcatctagagaaacagttggggctgcccagaaaaagaacagtaagaacaaaacaatgactgcaaagtggctagtgtgttcatgtgggtgtaagtgtgagcagaaatgatagaactgtgaagccaaaaattcaacctttggaagtgttattgcattttatacaagggaactccttttttggttgtttggagaattctcagctttaaaaattgcttttatctgtgacaataaagattccctaaagtggagcagcaagcaggcatcccctacttgctgaatatattgtaaataacaggtagaaatcagaagtaagccttgccttgcattctgttttctccacctctaccccaaacatttgttaattcaaataagctaataagtattgaaccctattactcactgtccactgagtacatacagatagatgtttggtttgtttaatgtaatcattttttgctttatttttaattaatttttactgaatacttgaatggattagataactggtatttttgtcagatttttccaaaatcattgttaagaccctgcctactcatgtctgatttctaagaagcaactttaatttccagtgaagtgtttgatgttttactccttaggcagcataggaaggggtaaaaataagatataaggtttcataagataagacccttataagaattatagtaatgaaaataaaattttttttttgagacggagtttcactcctgttgcccaggctggagtgcaatggcatcatctcagctcactgcaacctccgtctcctgggttcaagcgattcttctgcctcagcctcccgagtagctgggattacaggcatgcgccaccatgcctggctagttttgtatttgtagtagagacgaggtttcactgtgttggtcaggctggtctcaaacttccgacctctggtaatcccccgcctcagcctcccaaagtgctgggattacaggcatgagccaccgtgcccagcccaaaaataaatttcccaatagcaaatgtgattgtcctccaaagtcattctcctgttgctcataaaatagtagggacaactcgtaaagaaaagtagaatcgttttggccattttggatgatccatttgagtcagaattaaaatgcaaaccttaaaagcatttggcgtaataaatggcctctgtgaaatttttaaacagtataatcctggattttcctgtgcactgaatatgcaagttaaatttatacaaaagaaaactacaggaccttaatacaattgattattgctgtaaataatgacttccttaattttctcatcatgtgtctgtggagcttttaaatgcctaaacacagcagcagtcagctttgcttctcgtggaaaccatttaaggccatggtttttttttttaaatcttccttgtccttatactgaataaatactacttagttattggaggttttcagagtactgaatttatattgattgcaccctttgctttcaactttaagtaataaactcaagtcaaattatttttaataatgacatgactttctgatgaagcctgttaagtcacttcccaaatcaaaatatttaaattacatgcctcaggactccaggcactttgtctcaactgccattattaggacagttatggggtaaggcttttttaaaaagtgcagagaataagagcttgaattatagtgcattttttttttcagcattactgcttagactcttttcccagacacttggactaagatgaagagattcctatgccatatgtcaatctaaagagggcagaggcttgggacttcactgtagttgggtgctgggtctattcaggggttaatttagttctacttaaagctgtgactttttccacaggtggatgaaagccaaactggagaacccggctggcttggaggagaattaaaaggaaagacagggtggttccctgcaaactatgcagagaaaatcccagaaaatgaggttcccgctccagtgaaaccagtgactgattcaacatctgcccctgcccccaaactggccttgcgtgagacccccgcccctttggcagtaacctcttcagagccctccacgacccctaataactgggccgacttcagctccacgtacgtgttggtgggctctttctgatgatttttgaaatcccaatttgatcatttcccccccacccccttaagtattttcatagtcttggattgtccttctatgtgagggagctggctcattttcagtactcctttctctagctggcgaattggagattacagtccctgaactggatttaatgatatcattgtctaacagtgacttaccatggtacaaaatgaagcctgttatcttgttttgttcaataatgtatttgtatctatcattcttgtggaagaagtggagaaatacagtttcctaataatctattttgacatccatgtcagtcagcaaattttcagagttatttcctgcatgcaaatagcacttttttttgccaggcagaagcaaaaattgaattcagtcatgtggttctgaataagatagaaagctgtttcctttaaagctttccactttcattaatcttatacaaatgtacagtagaatgaagaggtgtttgcacttggccagttagttctgtgccctggttcatcaggaaatggcattttaaaaactgtgtgtaagcagaggtttgaaatgatagatgaaatggttgttcagacttccagttatagggccatgacctagatgagcaattgtctaaaaatattttatactaggatacaagtatgagtgatttgaataagaagtgtttaaattttttttcaagtctaatcatctttcagaagaaacaaattgaaggcaaggaatccagatgtattgctggagaaggatcagatggaacaaatagagggaagaaagaataattactcagggcgggaggaagtggagggaaggatgtaaggaatagcaagtttttcatactttattttcacataaaaggctgaaggcgctaaagaaggtcccctcatctaatctctgctttaagaaaaaaaagccttccattagcttgacttccaagttgaaacttttccttactcttttggtcttgactgaaaagttctgagtttttaaactaaagcttaggctaaaatagaagactaataccatattttccaggatttgttttgctggggatcaaatcagtatgcctcttcttcaatatatgtatggtgtgcagttctcttgctataattatgggcaccttattttccaaatgaaaaatcaggaattattttgattttcagatttgtttgtatatcttataaggatgtaaaaagtaaattgcctttagatctgcagtcacacagacatgtttatctaaaattattttttattatttattattattttgagacagggtctcacttcatcacccaggctggagtgcagtggcatgaccatggctcacagcacccttgacctcctgggctcaagcaatactcctgcctcagcctcctaagtagctgggcctacaggtgcatgccaccatgcccagctaatttttaagttttttgtagagatgaggtctcactatgttgcccaggctgatcttgaactcccgaactcaagtgatcctcctgccttggcctcccaaagcgctgggattagaggtatcagccaccatgcccagcctgtttatctaaaattattaaaatcacaaaactagaactgtccctgggacccaggacaactggttgctgtcaggatgccacttgtaattgctgtggcatctaggcatactaccaggtacttgctgtagagtgcatgggtctgagaaatggtgttgagaagctccagctccataggtggcatgtagcttttttttttctcatttaactattgttattacaaatgataatgatcatgtgaggatgtttctccggggctttgcagttacagagtatttccctagcctgtatttcatgtaccctcacaactaaccttaagtggcacagtattgttcccattttatcaatgaggaaatcaaatgccttttcctctcctccttgttcttttatttatttttctttttgagacagagtcttgctctgtcacccaggctggagtgcagtggcgtgatctcagcagctcactgcaacttccacctcccaggttcaagcaattcttgtgtctcagcctcccaagtagctgggattacagactcaatgccaccacacccagctaacttttttttttttctttttgagacagagtctcactctgtcatccagtccagagtacagtgatgcgatcctggctcactgcaacctctgcctccgaggttgaagcatttctccttcctcagcctccttagtagcttggattacaggggtgcgccaccacacccagctaatttttgtatttttagtagagatggggtttcaccatgttggtcagactggtctcgaactcttgacctcaggttatccagccacctcggcctcccacagtgctgggattacaggcatgagccactgtgcccagcctcctccttgttctttcactgtagaaagccacattaagtatactaggtttgtgttgcacaggctcattggttgccatctttttcttttttctttttttcctcttttatttatttatttatttttttggtactttactgtgggtaaaaagctggcatattagggagtgcttgcttttttttttttttggtactttactgtgggtaaaaagctggtatattagggagtgcttgttattcatggtgttgtgcttttccctccaggtggcccaccagcacgaatgagaaaccagaaacggataactgggatgcatgggcagcccagccctctctcaccgttccaagtgccggccagttaaggcagaggtccgcctttactccagccacggccactggctcctccccgtctcctgtgctaggccaggtaaaggcagccagtgagagtgtgaagacttagcatgctatctagtgccaaaaacttcagcaaatgctttttggcaatgtcattttgaagcaagccttgttatgtgtgtcttggttggctggcagtatgggaatccagtgcaggagccagaaatctgctgtgaatagttgggagttgggggtgggggtgggacacagtcaacttctcctgcctgggttgatgaaggaagcttcattgcagaagtggcacttgagctgcatcttgaccagtgggtaagatcttactagaaaatggagagagcctgcctgtcagacagaaactgctgggaaggctcgaaggcagacagtcagaatgtatttaaggaaaatcacatacccctccatttgtctagaccattgagttttttttggaaaaggtagaccaattaaaggttaatgggaggctctgaaatgccctgctcggaaagaataatgtctgaaaggataaaggtggttattctgaatagttctcttttgcttaatacaataatgataaaatactcaaatttctatcaataatcatgccaaacagcaagtgcccatctgggaggcactggaggttccagcatcatttctgatctgagaacacccagatggaacacagggtctaggcagatccatctggaggagcggtgtgcaggaagattagagtggagggccggcagggcggtgccaccagtcagggggctgttggtgtcacccagctgagacctagggcaggcctggacccagctgagttcatgttcaccaagtagggaggtgccggtggaagcagaagaggcgagcacgtgggagagactgcagaggagagtgaagaggttggagtcacaatgcctatgggagccgaaggaaaggaaagagggctgggattgagaataagggcccaccttaaagcgggaagggagaaaggcagaaaatgaaatgaatgcgcagttaaagggaagagttgtgttttagttgtgttgagttgaaggtgaacgtgggaccctgtctggcaggctgtcggaatatagatctggaggatggaagagagcacgagactgggattatagattggagccattcccatagagaacattatcggatatcaggaaatgtgtgaggtcatccaaggagagggaatacagggagaaaatagcaaatccacaggcacgtgtgtgttctgtggtctggaagaagaagaggagctactcagcaggaaatggtactttcctttgcatctgtcctagctcagcatttagcacgtgtcacatgctcagttaacagtaactcagtgatggggtgggggtttgttccagagagtggaggtgggggatgggaggttgcttatgttactaagtaccgtggtcagggcaaagaagagaccattcattgtgacaggtagagctttgtaacctgggaaggagaaggatgaaaccacactgcaggggcgtaaaaggaaatgagcagcaagaaagtggaaagatctgcaaaaggaaagagaaggaccagagtgaggggcctcgggaaagcaagaaccagccatgttgccagtggagatgggaatggaaaagtgaagtgtcagaggatatagttggtataaggcagaaaacattaaaagcacagaaaagacaggagtctttttcttctggatgaggaagagtgaagagattggagaagataaagccaagaaaaatgttcaagttgggctgcatgatattgttctcagtgaggagggagcctggaggggctgcggagtgtagaagaggtttgggagcaggcgaatgagggatccgacaaagaagaatgaagaattgggccggcgcggtggctcatgcctgttatcgcagcactttgggaggcaggcaggtcacctgaaatcaggagttcgtgtccagcctggccaacgtggtgaaacctcatctctactaaaaaaaataaataaatacaaaaatcagccaggcatgacggtgggcgcctgtaatcccagctacttgggaggctgaggcaggagtatcacttgaacctgggaagtggaggttgtggtgagctgagatcacaccactgcacttcagcctgggcgacagagcaagactgagttctcaaaaaaaaaaaaagaattgcctggcttaatttaacctgagtccgtaatagatcattgcacattgcctcagctttctctagcaatgcttcacagcttgggactaggaataataatagttatatagctcaccactgttatttctatcatagcaatactgtgcatggatcttactaaacttccttccccctccccacctacacacatcttgcattaccatgggattgctaaactttaatagccttttggagaaagtatcatctctactttacagatgtggaaatcgagattcagagagattaaacagttgccaaagccagaaaattagtaagtgacagacctgggattcaaacccagagtccacatccagcccaggctggggtcattagggcccatcaatgtgaaaaggttgacaaagcagacacggggaagatttctcagggggagagattctgaaataccagtgagggcacagttgaaaggccaaccctggggtccatacgtagagaaatcagtgaagtggcggagaggattagacagtgcagaagggctgtgggatgaggagctacgcgggcagcaggtccactgcaagagggggaaaatggaaggtcgagaatatacaatcttaggggtgttcgaaatccagggaaaccccctcagctctgagggacttgaaggagtgaatgtacagctaagtggaaggaaataggatagggatgttgtgggtttaagaaggcaagaacccatgaagaccaggaattagaggttatcaacatagatgctgaaactatttgacctgttgtaaattctctgctcatcagacataatcataacttaatgtcagtataatataaatgacttctaaaggcatgtacaaattggttctgaagtaactctctctaggcattatcttttgttcttgtccattcatatatatgattgaaagttggtgtttcattttttactaaatgctttaagatactgtaatggtttaatgctatagcttaaaagataataaatgcctcaccctgcctttccagcctgacttcctcctccacccctccatgagactaggccacatgcagccccggattgtgcttctcttcccggaccccctgcagtgttccacctcgaggcttttgcccatgctgcgccctcggcctggagtgcccttcctccgaagccctagctgtcaaagtccttctcatccttcaaggcccatctcagatgctgccccctctgtgaaatttacgctgatgcccccaggcagaattcatccctgttttctctttattcctgcagtgaatagtaggaactcctttttagtatatttcattctgccaggtggtacacttggttgtttttatctctgtcttccccattacttgtgaattacctgctagtaatactgcccatctttatagtgctttgtggttaataaagtgcttttccctaaattatctgggggaggcagagactgtttttttcatctgtaatctcatggggcagtgcatgtagatgtacaataaatggtaattacaatgaatttatgctaaccaaatccctgttttctctgaaaaggaactaaaacaagcataatccagatagggcctatttccctgggtctacctaatctaaaatgccagttaatgatctcatgatagttcataaaatgtctgctccactgttaatcctccactaaaaatgccagtcaaattggaaatggggaggtgtcccgggcaacttgagagtgaaaatagaaccaaaatataaagggcacacagccagatgcaacagaataattgtgacctcctggctttttgaaatagagagttctagatggtcagacaatgactttgtgaagaggctggaaggctttggcctccacttttggaaataaacaattgttgggaaacagtgaagcatccagccctcctgctgtgctgcctcagggccctttgtggctgtgtgtgcttgtctggcctgtgcttgttggagaggtgccatgctcacgtctgccctaattgataacaaagcgcaacataacgagaggtcctttatgttattccacacaagggtgaaaaggtggaggggctacaagctcaagccctatatccttggagagccaaaaaagacaaccacttaaattttaacaaaaatgatgtcatcaccgtcctggaacagcaagacatgtggtggtttggagaagttcaaggtcagaagggttggttccccaagtcttacgtgaaactcatttcagggcccataaggaagtctacaaggtatttttgtatttatctgcttgtatttgatgaaaacaatattaggcgttatattactgtttgcactagttaagattcacagacaggagttgcgggattagtttgtcttctagatcttttaactgcaaaagttatagtatatagagtaccaaaagggagcctcttatagataagtgcattctttcttctctcatgaaaacctatgtgccttgtttttcattgccttatgcaagaaggaattcagctctgagacctggaacactcttgtgcattagttggagattatgactctctttatgcttattacccagtgctgtaccagatatatgtgaatacttggaaacccaaaggatctggggaaatgatcagaaggacttaattgtctttttcattagggtcttatagcatggaacctaaggttgttaattcctccaaccatattgatgttcaaaacaaattatgagctttaaaaggatgaaaatagcaaaaatattcaatgagcatctctcagtcagtcatgccttgaaataaactagtacataagccatgtgtccagtatagcaaagtgctgaaaaataagaatgcgagcttagagtcatgcctctgtagtaccttattatgtgtttttaacctagctaagtacaactatttcagctgtgggtcgtttaaagttttaaaagttaagcagttttaacagaaaaatcagtgtcattgtacgattttctttgaagataaaaattaaaatactctcttcttccattattgcagcatggattctggttcttcagagagtcctgctagtctaaagcgagtagcctctccagcagccaagccggtcgtttcgggagaaggtgagggcctgagttgtattatgttcttcagaagggtcaaggacattgtgtaaatgtttgaaatgagattgaatttcatcttaagatagactgcatttatgatcagtatattaaactacagtaaaatgtaagtttagctctttacagaatcggagtacttcatggaaaatactgtcaggtatattaatcatcaaaaactgaattttctaattatattttattataagccctttgacttttaaaagagacccattcagttcactaagaatcgagttttccgagcatctctatagctaaactatggtcattgcttcacctaacatagtctagtctcatctgacttcatagataagtatttcgttttaaaagtaactacaggccgggcgcggtggctcacgcctgtaatcccagcactttgggaggccgaggcgggtggatcatgaggtcaggagatcgagaccatcctggctaacaaggtgaaaccccgtctctactaaaaatacaaaaaattagccgggcgcggtggcgggcgcctgtagtcccagctactcgggaggctgaggcaggagaatggcgtgaacccgggaagcggagcttgcagtgagccgagattgcgccactgcagtccgcagtccggcctgggcgacagagcgagactccgtctcaaaaaaataaaataaaataaaataaaagtaactacacagaccactagagttctcatagtaacatgaatgccatctgtaccatcccaaatgaaactgaaactcaatttctgtgctccatgaaaacaatcaaaccagacaatttaggactaaaaaaaaaaaaatcattttgagtatttattatgcaaataattgccttctttctcaatctccacttggtgacataatcctaaatattgtatggatgccaactgaataaaacttaggtaattcaggccctcatggtaaaaatctcacatcttttttacattcaatacagccatcatcacatcctaactggagagtgctccctgagttagatgggttttctgtgtagacatctgagcagtgttgtagttaacagatgccataactaaccaattctatagtaattctttatgggttccttgaatacattacaggagaatagaatgttttatttagtttgtctgccataatgagattgttaacattccttagaaaccttgcccagtgaaaaacagaattattaaaacagctgttttaggtggagacagcaaggattaaggtataatggtatttcagactcacagtaacaatgttcttttttcaagaggttttttaaagtaagaattttttttagttcatagtatagctataaaaccttatcactaaacaaatccagcatctaatttttgctattaccatgaaaatgattaacagagttccctttatacattctcattatcttaatgactttttatccactgttagggtaacaaggcaaaaagctcctttaaataccacatgcagtcagtttagtaaaaagcaacttatgcacctcaccaaaagataaagaaaaaaactttggtgtgttacatccaatcaaggctcactggagggctggagtttgtatcttgactcacccatctagtaacagtattattttgtttatgccttagcttctttgtctgtaaattggccgtgataactaccccttgaggtaggaaattattacaaggataatgagataacatgcagaaggcttttagaacaaagctcagtaaatgtctgctacttttatgtcgtttttgcttcattccctggattagtgataaagccacataaagtatgagcatcctcatccaatagcagtatggaggagtgtttgtttgttttgagacatgtactgaggactcaataaataggtcacaagtgaaccatgcatgtacttaaaattgggcaacataatagagttaaattctgatcttagtttgtatttattacagccaattttgaaatgacttagttattagaaatatttggaaaggttgctggctttgtgaaggggtgggaggacattagaaattctgagaaaagctatttacatatattaatgagccttttgtaaataccacattgaacataatcaaatttaaagtaaactgtaaaccagataaaatagatgattggcttgggttgcttttaaaatatttaaaatattggcttggggatggccagtgccctctgtggaatgtttcctgagaaggggtagctaaagaggaacctctgcctatccatcatcatgtctctgggtttcattgtcaccctaaagccactctcagatgtctttgtgcaaggcaggcagggcaaggccagcctcagtcttcccagtctcctttatattttatactgcaataccaagttcagccagagttcatgtttctgaagtttcttaagcatttggaaagttacttcaaaatttggatcaattttaaagaaagtaactttgaagttgaggaatcactggggaaagtattgatggccaaggatcctgtcttaaatggccaaatatgatctaaagaacagtaacagggagcaaaatgaaaagggaagggtgagagtatggagaagtcagaaaaatgagtctgttaatgaagaaagaatgaccctattaaagccaccaaactttgatttccttgtgtgggaaatcatttttccaattttcactgtggaggtatgtgttaccagcgcctcagggctaaagacagagagtcttctgttttccctgggacgtttgaatgacctgtgtctgccatggggcccagtgctctccaccagcaattgctgctggcctcggcgctgacaggtcaacactggcgctgaaggaggcccttgttgctccaggggctgcccacgtgagcacaagagttagaggtttttgtgtttttgtctgtttgttttagttttcattagtacctcctgcagaggctctgataatcaaccgaaggagttctccataaaaaattcctacctcttactcaacacgaggctcgacattaaaggaacatcatctgaggtttagagagaaacatacattgtccatcataaaaatgaactttttgggtaaatggtgatttttctgttgctttaaaaaaatacatacaaaagcctaggataaaatggagaaaaaggggaaataagaaacctgtgcatctttctgtaaatcttttatcctgtacctagaacctccatccaggattttgtgtctggtgatctttctgagagtgtgatttggttctaagccttaataaaatccaccaagagtgatgcaaagttctacatctaattaaaaaggaaagtttcttctgtaatgcacacccttcaaattcaagacacaaaggaacattagttcttatcctttaagactaaattacatgaataataaaatgtgataaactgtgatttgtctttttaacttgttgaaaggctttctgggattgggttagacattccttttatcatcagtcctctctacctgtttgtgctcttgaatgacaactagatgcccatttttaactaaacaatatgtgtaactcattttgtgttctaacagcttcctatcatattgtgtatatggcacaataggacataagttttcaggcacttcaataaggaaaagtatgtcttatttaatttatgcgaaggatatatgctatctaacaattttttaaaaacctgtgacgtagtaccctcaaaactgaaatacacatatttaatatgcttaccaagagcctgcatatgaatgcatctgacccagtgctcagcacagagtaggtattgtgtaactcttagttaaaaataaatgtaaaaaccattttcattcaaaaagaaatcatgatgctaaatggtagatcactcttaaatactcaagtgtcggtaaacatgcagttgggttttttattcctgtgtctgggtcttcccaggaattgtctccctgtctgcagctactgaacttttatgtgcactgggggaatgtggagcccagggcattctgcagctctgtattttatctgtgactagcctttctcttgaatggatcttgtcctaacttccttattcgtaaacttgcttttgcaaagctgtctgggatttctttaaacaatcaagctctctccgtatctcaatatttctccccaccagaatttattgccatgtacacttacgagagttctgagcaaggagatttaacctttcagcaaggggatgtgattttggttaccaagaaagatggtgactggtggacaggaacagtgggcgacaaggccggagtcttcccttctaactatgtgaggcttaaagattcagaggtaaacccacattaactgtttcctctccctttctgtgcggtgattctctttgtggggagtcacgatgtttgacagcggaactttgttgggttttgctaagttctggaatgtgacagtaaatccagtgtgacctgtcattgtttgatcttgtcatttggcactgcgcagtaagcactggcttcccccaagcagaatgccatcagggctaagtggaggctgagtgtgatggggctggtccgcatcagctgggaggataatgttcagtattaagctctcttcctgcctgtaactgacttacgctttggagtaaactttcttgattagatcattatggtcattgatttttaaatgcccaagaatggtagcaatattttgcctgtataaacagaagtattctggtgataatcgccccagaatattggatattattagaaagtttttagaatttctggttttgcccacacagtagaaagacacaagatctaagggatgggtacacttttggctaggccttagaatctccgttgatcaggactgaatttaagtgctgttatccgtatgaattggaagtgctctcactgttgttaaatagagccctaaaaatttgatcacataaactgtggtcttaagatagtgcaagttgaatggaatggtggggtggacctaccacagagcatgggagtcagtcttgtaggagccacttgcacgttagtggagagtttcagggtataaatggagtcatttaacagatccaatgcacatttaaaaaaaccaacaagaattaactccttttttttttaagtgttgacagtcaattcacagttattttctttttctcctcatacctcctaggtactgagagagaaaaggctggcagggagcctgtaggggccgctttctcaggagtgagcaagtggacaaagttctctctctctttcaaatgccagtagtagagtgtatactgggctcttacatgtgcggctccgtgtactcggagctgctctgggagcgaggctgggcctggtgccctgctctaggagtcctgcccttggcctgctcacctctcctgcagctcccagaaatgattttatttgcttgggttttgtttttttaaggggtggcattgttttgctttttggtttttcttgctgcggtcttgagagcagctaagtggaattcccatggatggatttacataagtctgcccacccttggagaatctggcagaagcccggaagaaagtaattttgccctgcgagacagctggcatattggacttttcagacctggaaacagagaattcaattcttctccaggccagcaagtcgagtccaatgagagtcatacagatgatatttcaggggaattgggtaaaacactaaaagccaaactcaatttctactaccgtgcatgaaaactcttaaagtgactttaccttttggatcagttaaaatacgaaagccattacttgtaatgtattttaataagttacagttttctactttaataaaaccatccgaaataaattttaggaaaacacacagtgacttttttttttaaggtaagtggagttgtaaggtactttcttaaccacagtcttaaattattagccacagaagaactagcagtactagaaatttttagatatacatctagctatactattcaataataatgaaaaaaaaacctgaaaactcagctctttcgtcctacttgaatacagaattcagtgtaaaagcaaaatatccgacccaacctaacaccagacccagcttcagataccagaactgacgtctgggcatggggagagtcgtcccatcctgcttcccttctctgtatgggcaggtctggggcacagtctgggggactttataggtgcagggaggacagaacatggccttctgaatccatctcagcttatggggctggctgtggtttttcaaagggagcacattgaaactacttgaactctagggtactgccaattgccttgttctttttatggagtatagggagtagattctaagcctgtactaggaaagttaactggtcactggagtcttgtttcattggtattcctttttttgatatgcagcctattgaaaaatagtgagagattgcttttgtataactttgttcgttaataaagcagaatcagagtaaaaatttaacccgaacttttcctggtaaatgtttcttaaatttcaataagcaaaataaagagactgtaagttgtgttcctggtagataaatggcatatttttattctttcagtaactcatgttttgtttattaagccttttgttttgttttaattggaatgcttaatttactgcaagatagactcaagcataaattaatttagaataaagtactttgtaacaacagattccgttctggctcctgtcctgcctctcgtggtctctgttgttggcttacttggctggtttaaaattccatgagtatcccagagaggaattcaaccccagagcactttttaaacacttgatagttgggaagaaatatgctctgcctctatgcattgatagagaaatttcaatgtataaactctgtgaaattgggtggaaaggccacacaggacagccactgcctctttggatagagaggggtgaataggatgggggaagagaggttccagttgtccctgttagttttttaaaaaagaaagctcctgaagcaaatgtgcaaaatattaatattttaatgtgttaaaaccgggtagtaggctcgtgagttatattccctgtactttttatgtgtgaaatatttcataattagccatgtgaaaataagtccgagcttagtgtttaggatgtaaactaacagtcttcctagcctggaacctcctcttagatttgaccaggtccgagaagtgcctgtgcttggagccctctgggctcttacaggcgccatactctgctgtttttttctcttatagaaatgagtaaaagccacatgttttaattatttttttccatgttttcctgatctatatccttgtgtcaggtgatacagtgctatgttttcccagaatgaaaagtggggctttggggctcaagcgggtttgtatcatcattaatcgtttttaaagttgcatgatcaaaacttcagcatgcaaatgagaccttttgctctgttttaagggctctggaactgctgggaaaacagggagtttaggaaaaaaacctggtaagttacaaaccctgatgcttacttttcaatgttttgaatgtaattgatagttgctccccatctttgtgtattagggccagaagcctaaaataaaaagaatctttcctaagagtggtgagagtaagtcctttccttggaatccattaataattttacttggttatgagatttgtctgttgcttcacacatgaagagtggagacgttacctaacagaatgttctcttgggttgtcgagaaataattcaggtgaggccaggcacggtggctcatgcctgtaatcccagcagttttggagaccgaggcaggtggatcatttgaggtcaggagtttaagaccagcctggccaacaggggaatcccggtctgtaccaaaaaatagaaaaattagccaggcatagtggcatacacctgtaatcccagctactcgagaggctgaggcaggggaatcacttgaacccgggaggccaaggtggcagtgagccgaggttgctccacttcactccagcctgggcgatagaacaagactctatctcaaaaaataaaataaaataaaataaaataaatatatagataaataattcaggcaagatgctgggaagttataatacatggagctgtaggattatgggctcagctgcttctccgtcttcctcttaggcttggttagccctttttcatttcataacaatgcattcccaggacacaaacaatggagaagattagagtgtaggtcccattaatgtagaagccataggatggttttcctcggtacacattgaaggtacaaaattgtagtcatgcctctgaatccaaagtgttttagtttatttcagtaaaatcacatgtgctataaatagcacgaaaaagaaaagaaagaagcggatgtgaaataatacggtttctgtggcacgtcttcctggtctaggtcatttgaactttttggctatcatattcttagaaaattataggttgaaacagtcactgaattgccaagagacggatttgcttgtctgtctggtgcccagctccaactgggcttacatggctagggaaaagaagggaaatttcacgtagtctaggattttattttagtcagataaatactggatggagtatttagtcagataaatacagtggatggagatacattggaccaccccaccaaatctccgttttaagtgtaagttttctaagttttgtacacttgtcattccagagggtccagatatttcatagatgaagcccaggtgggctttgctttgcactgaaactagcaagaaaggacacaaaagactgcagagaatgttggggcagattgctggctgcgtatgccaggtcccttgaggagcaagaacatccagtgccaaataggacactagtttggtctttctccaaaccataaactcttggaaccaagagctggtctttggtgtgttgcaggagagtcctcatcccagcgtagacatcccagctggagctcccagtcagagcctaggctgggccagtagaccatgctgtggcctttcttgcttgccccaagctctgcaaagcatcaggcagggccaggcctgcaccatgaccgccaggtgcttctatcctggtggccgacccctgatagcatgcagaacagaatgagagcggcttgcttaagggccagagtcttacttgttccctggagtgagtagaaaagtaggaaatctcgtcagaacatgagacctttttgcgttcttcctttccattcttctttacttcattccctctttcttcttttttttctgtccttctttccttcttttctcctttcgttcacaaaccacacttggagagcaagggtagaggagcagaacagtttgttctctattgcttctagaagttcagaaagcagtagttgcagatgagccagaactcaggcagagaagggttctgtctcttcatactcagtctcctgggcccgtggaaatggtgtgtttcagagcctggtctgtggtaccgctggagtttttcccatgggacttttcacattcaggaaaagtacagaactgttcacatttttttccctgtgctgaattgtttttgcataaagttcccttcttaactccaggtccctcctgtaacgtgaaataaaaagaaagaaatttgccctgccatgatttgcacctgatattcagggatcactctcaaaatgtgagccataaagaagaaggctgtgtcgttgggagtgagaatctgcagcaacaacatagaaataagcccctgccgggctcccagtggtttctgaggaaaatgggcttctctttctactgtacttggcagctagaaaagctattgagtcctttagtcacttcaaagtagcactttagccattgggtgctactgtgctggggtgggtggtgaatgaggccccacccttggcctcagggcattctgggtaattatgggaggggtgtgacagaaggtgccaggagtgggcaaggagcggacttcgtggagggaagttggtaagtaagtttcacgggatgacaagggagtctgcagcccactgagggctcaaggatcagccaggcccttgaatgccgtgtctgcctggtagctctgggaacgggcgattcagggagccttactcgttgggtagaaatccagctcaatacattggttttgatgtgttcatctgtgaacctgggaggcgcctgcatcttcttggccttttctcctgctgactcttaacagtgcactgccgtgtttgatcttgtttttcagaaattgcccaggttattgcctcatacaccgccaccggccccgagcagctcactctcgcccctggtcagctgattttgatccgaaaaaagaacccaggtggatggtgggaaggagagctgcaagtcagtgtcttttttgtttatttacaattctccatccaagtttcaatacacaaaatctcaaagggacgctattttattgtaaagtacaaaccacccctcaccacctaaattctgtatttggatagtgagagatgccaaattttctgtgtttgtttggttcctaagtttcagacagccggtaacagatttctgagagctaggagcgcatacgaaaacatatctttcccattcctgaattcagatagagtcggcatagtgagaactcatatgacgagggatgcctgcatatccttatgtgccttggcattagagagtggagcttttcatcagtggtattagaaggtgtggcacaagagcagatttctttgcattcaaagccacatccatacatcacagtatttttagttcccgtgtgtgtgcgcgcacgtgtgtgtgtgtgtattgttaatcatatcatcttgtttacacattttaccattccagatacttcctataagtctcatttccagagacaaagatgctttaaaaagattactgttacgcagttctcatggtaaaacttcttagaatcattggtggatgcccaatctgcaagaaaattttcagtaggagcagaaaatgtgcatggtcttgaagtgacccccacagatcactcatgatctgcaggggaaaacacaataattatagagtggggaactaggacaagacctgaatgaggtgatcagaatgatgagcagtggggagaccagaggacatggtgtgtgtacagctgtgccgggagggaggagggagggagtgactggtcttcaaaaccgtcaggatcataaaagacaaaacctgtcgaaagggggctaaagaggcgtgaggactggctgcagtatctagactcagtgcagtatctagaccctgtgtgaaagaaaaccacgctgtcaaggacatttttgggataatggacaaaattgggttatggacactacattagacaaaattactgtaccagtgtaaaatttacagaaagcaataactgtactgtggttatataagagaatattcttatttttaggagatacgtgttgaagtatttaggggtagagttaagatgtaagcaacttgcaatcagatgaatcaaaaaaagaacttgcagagaagagggtggggggggagggagggagaacgcgcacaaatgagggagcagctgctgccaagtgttgacagtaggtgaattcgggtaaagggcctatgggtgttctgtgtgcttttcttattcttgccaattttcctgagtttgaaatcatttctaaataaaaagttgcctttaaaaagttactactatagcagttacttgagaggtaagccagctgacttttcatacagaaagtgtgtctccctccccgcatcctcccccatccaaagtgaagatcagcctcagactgccaggcgggcacctggccacctgcttcatagcttagtgaaggacagggcttgctccctggcttgcccacatggggcctatggaaggactgaattttccagcagccgtccgtctctctggcgtttgttgaacgtgggcctctgcgtaacacaggggggcctcagtaaggcttgaacggatataggaaggaatggtttctggaatgctttgtgaggaaggggcccatgggaaccctttggtggctattagtgggcctgtagactgacttacccaatctgctggtatttgtctgcccatgagcaggacggtatggaactacgtaagtttgagggggaagagggaggcaggaaacctttgccatgcagtggactagccacggaagacagaccctcaggtgctcctgaggaatggaggttggaacagcaggagcaggaaggaagaaggccttgctggggaaggcctcgggtctcacacagtcccgtctaccactctgtggaagtgagcctgaggccaggacaggaagagccacactggagagctgaatatataagaaacgcatcttggccagaatagaaggcacaacctggagtgtaactaaagatgaaactttccctggagagtttgctgatggacacccataaatgtccagatactactcactggttaaggaatctgacctctggaggcctggaaatccactcctttttgtcagcatgccttctcctgtgctggggagggagaggcctccttagaccctcgggtcccactccctgcttagagttgtgctgtatcacccattggtccttccagcatcatgcccctgtcctgttctggagacgtgggagactcccatcgcctgtcctccttgcctgccaggggaaggcttcctgcggggcccctctccccggtgcagcctcacgtcttaccgctgagcaatggcgtctccactccagcctctttgaaacaccagcaccccctgctctcctgccttgctgcctttgttcatgacatttctcaccagcggccaaccagctccaacctctccactttcgcaagagctgggagatcccacttctggaagctctctgtgaccatcccaaccagaagcaccgtgtccctcccctgagctccagcactggccccgtgccggcaccactctttagtattttatattactttgctttctgtgcacatttcttacttccacatgtagctgactagcaccttggaggcagcagccgtatttttcagtccccacacctctagcactgtgcttaagtgagtgtttgagtggttcttaggattctcaataaagtggctgagttgccatgacccaggagagctcctggcgctgtcaccagagtgactctcagcgtggatccacaaatgaggaaacaccagtgagttctgtgctgtgctgcagaggtgtgggaaagagtggtgtcattgcgagcagaatggtggtatactcggtagataaacgtggaaatttgtaaccagatggcttcagtcatcggcaggttcactgtaaacataaaagctttagtccttgagccaaggggatggaatctatcagacctcaaggaaagggaaacctgctctgtgttctgaaaatgacctagaggtatccctcttgataaactggcaggtgggagggcagaggtaatgtggtggaagttttcttttcttttagttttatttccttattttgggaataggtaattatagtcacatggtttaaaattcaaaagttacaaggggatataaatgtctccctcccaccttgtccccagaggtggctgtttcgatcagagccttgtttctagacgtgtgtgtgtgtatgtgtacgcatgtgtgtgtatgcacaagtagttttgggttctcttttcttggtggtgtacagaagggtagtcaaagcccgactcatgatccctaactcgagtcttttaatgggattgtgtcctaactgcaaaacccgcctcaccaactttgttataaactccccgggtttatagggacagtcatctactgtcccttcctaacagcatggtgcagaaacactccataaatgagtcttgtgttgaatcagattgaattaagtgagaaaggaatggcggtgaaaaatgtggctttagtcatcacatgggcctacgggtttgtgaaagtaacattgagtctccttgtgttctgtgtgtactgcatgtatgtcatcttgcatctaaggatgtatattacccataaaggagcatgcagacacatgagtgcatcttggcttgccactaactgcctgtggccttggggctgtcactcaacttttcatctggaaattgagaataataatactattatccttctggaattgtgtgcataaatgcacagggcctggctcataaaaagtactcagtgagggccgggcgcggtggcgcacgcctgtaatcccagcactttgggaggccgaggggtgcagattacgaggtcaagagatcgagaccatcctggctaacacggtgaaaccctgtctctactaaaaatacaaaaacaaaattagccgggcatggttgcggtgtgcctgtagtcccagctactcaggaggctgaggcaggagaatggcctgaacctgggaggtggagcttgcagtgagccgagatcgtgccactgcactccagccggggtgacagagcgagactccgtctcaaaaaaaaaaaaaaaaaagaagtactcagtgtgtattggtggccattattattattattattattattcctaaaacccatatacagtgttggcattaaccataatgtctacattacctgaaattaacagctgagtgctagcattacatgagtagaatttcctgtcccaggcaatccatggtatatcttaattttgtgatccacacagtctagccgaagcaaaaacattctgggctttgctgaccagtgattgccacaatttgaatttttagctatggtgttttacttttgtgacatagtaatccatagattttaccgttaatgtcatttgtttttcagttatatgtaagctttacataagtgctctgttataaagtgagctgtattataaaagatgcgcctttaaaaatgtttgatgtaattattttcttactaggcacgtgggaaaaagcgccagataggctggttcccagctaattatgtaaagcttctaagccctgggacgagcaaaatcactccaacagagccacctaagtcaacagcattagcggcaggtaaggagtttcgcatctctaactggaagatggtctgcatgccacttgagtttttccacttgattttctcattaaatatcttaggttgtttttcacatgtgctttaaagcacttcctgtacttgctgggactgacacccaactaatgtgatatggaatatgtctttcaaaaggaccagatatctaagtggcttttctgtgctggatacaacagaacccttgttggaatgctcttcttgcaggagtcatgaatgctgtggcattaaggccacattttcctcttgatttccttccagccatttaaattggggtttaggctagggggtgaggtgacagaaagggacacccaaaaataaacggctggggtctcagtaggtcatgagatggagctgggggccacgggggttggggggctataatgtggtgttcactgaagaccaaaatagctcccctgtgacattcactgtgggcagagggggcttcgctgggcaggcaggatgttgtactcactttcctggaggactggaaaagaacagagcacagcagttggcccagttggctattttctgattgaagggaccaaatgagatgcttcagcaagatctgagagaggtgaggtcagggggagcagatttctgctttaggtctttaagccatcattcttggttggcttttgtggaaagtgtagaatttttgttccaataccttgtggttaaatatctgtgctgtatgtacccagtgagataagattaaaaactggcagccttctcaagaaattaaaggatgggcaaactttgtgatgagccgcagtccccactgggcctctttgcttgagctgtggccttgtgtaggctgaggaatgtggttcccgcagggtttgctgtcccctggagagatgtgtcagtatccctccacttccatgtacagccccttcctcaggcccgctgaaattagttgctgaagtgattgaattagctggagaatttaaaaagcctaaacctatttattaataggttggttaagaaagattcatagggactgtgacctgttggtgcagactcatctgaagtagaagtgccaaagaatgagaacaattttacctcctgtaagcttgagagaaaatgagaaaagaaaaattgttcttgagggtggagatttctttcaggacaacattttgagatgcaaagatacagcagcagaaaaatcttttgaaacactgattttaggcctggcatggtggctcgcgcctgtaatcccagcactttgggaggccgaggcgggcggatctcttgaggccaggagttcgagaccagcctggccaacatggtgaaaccccgtctctactaaaaatagaaaaattagccaggcgtagtggtgcatgcctgtaatcccagctactcaagaggctgaggtaggagaatcggttgaaccctggaggtggaggttgcagtgagctgagatcgtgccactgcactccagcgtgggcaacagagcgaggctctgtctcaaataaataaataataaataaataaatcactggttttagttttccctaagatttggaattcttggaggtcaaatgatgattaccttccactttaaaccaaaaaggaaaaatgatagtaaagtccccatgatacatagctgtcctgtgcagcagaagataggatggggttgggctggtctttccagagtcagcagtaggaaggagttccgctgcactcaaaacgaaagccctcgattagcactgtacattttctgctgacaagtaaacatgaaaaagaggacgatatcataaaaactaaagacttagtgtgaaaattttgttgttgtcttagtttttaattcttcacctttattgcccacactgtaaaaagcccaacagaacagttccacctactgtcaccctcttctgaaaggacagaaatagtagctgggaatgttgaatggctgcgcggtacccgttgtgcattctccggcgggtgtgcagccgctcacccagccctgtctcctgcagtgtgccaggtgattgggatgtacgactacaccgcgcagaatgacgatgagctggccttcaacaagggccagatcatcaacgtcctcaacaaggaggaccctgactggtggaaaggagaagtcaatggacaagtggggctcttcccatccaattatgtgaagctgaccacagacatggacccaagccagcaatgtaagtgccctggtggctctgtcgcctcgcctctctggtatcttcccgtaaaacatgcagcattgctctgattctgctgagctttgtttgcagaacttaaagctagaccattgctgcattcgcagtcgtctctttgaagaccttctgtaatgcaagagtttatctcatggggttttatttctctttaattttcattccttctgtagcatgtcccctccctcccctccctcctttttcctttttttttttaaatcattttggcaccatgctgtttacatgcctgactcattttcctagcttgaattttgctcattgttttgttttgcttatgtgttgttttcctcctttttctaggaatcatatgttgtccatccccccctcaggcttgaaagtcctcaaagagacccactatcccatatcactgcccagagggatgatgggagatgcagccttgatcatgtgacttccagcatgatcacctactgccttctgagtagaagaactcactgcagagcagtttacctcattttaccttagttgcatgtgatcgcaatgtttgagttattacttgcagagataggagcaaaaattacaaaaacacacagggtagtgggtccttttgtggctttcctagttactcaaattgactttcccccacctttgcacaggtgctttcaatagttttaaaattatttttaaatatatattttagctttttaataaacaaaataaataaatgacttctttgctattttggttttgcaaaaagacccactatcaaggaatgctgcatgtgctattaaaaattgttccaaatgtccataaatctgagacttgatgtattttttcattttgtccagtgttaccaactaaattgtgcagtttggggcttttcccccttaccatagaagtgcagaggagttcagtatctctgttttaaagacgtatagaatgagcccaattaaagcgaaggtgtttgtgcttgtttgtgtgtatcagctgtaccttgttgagcatgtaatacatcctgtacataagaaattagttctttccatggcaaagctattaccttgtacgatgctctaatcatattgcatttaattttattttgcacagtgaccttgtagccacatgagaaagcactctgtgtttttgttcggtctcagatttatctggttgagttggtgttttgtttggggtttttaattttgcgtgtttgcatagcataaaatcagtagacaacaccactgaggtcgttacgatcaacgatatccacagtctctttttagtctctgttacatgaagttttattccagttacttttcatggaatgacctattttgaacaagtaattttcttgacaagaaagaatgtatagaagtctccctgcaattaatttccaatgtttacattttttaactagactgtggaatttctacagattaatatgaaatggagctcatggtccgtttgtgtgttagatatgctgtagctgaagccctgtttgtcttttaaacactagttggaagctctcaataaaaatgcctgctgctcacagcacagaaaatggggcagggggagcctcaagcacaatctagctgtcctcctaaagactctgtaatgctcactcccctcgcgttctcccggcgctgtcgggaggctgtgctggtggtcgtgtagaggtccttctcctttcacatggtgcagagagcgaggacctctcctcctcgttcagttgcacttcagtattttcacggatatgaatgtaaaatatataaatatataaacctgcggctttaacaactgtaatacaaccttttgaattagttccgtgtatagataattaaattcttcatacaaaagttagatggaaatgtctctgtgttcttgatgttggaacctggcagtggtggtgaggaaccaagcagactagatgtcagcaatgggcctgctgcccacgtgtcaaccatgacctgtgctctttgaaatacagacattatcagaggctcgccgagtctttgttgaacagccctccctctccccgtgctctccaccttccctgatcaatatgcaaatgatcattccttataataccagtttcgaaacatagaactctaccacccagtttagcagttcagtctcaccgggcttttgatataagttgtcgacacattgagggtgtgtgatttggctcagggtacaaaccatttgtccaaaagatgtatcgtaatgtactggtgaacacccccaaaattatgtgggtaaagacagaaacttgcacatgccccacgttgtctgggatcggcttctgcctggcacactttgcagaaataaaccagcgtccacattgatgccactgtttgctacaatgaccacatgcttgattccatcctcatgagcttcacttattggacctctcctgccattcagtggaaaagtggtttccttcctcaattcagcagatatttggtgggggggatgtctaccatgagttgggtgccccattggcttctgggaggagtgtggtactccgtggaaacagagtccctgtcttcatggagttcatattgtaatggaaggaacaaacagaaaaccaaactcctgcaatccatataaatatgcacggtatgtgtgtgacaaggtgacaagttctgcactagaagtttggatatgaggcaccactgagcagactggcagggccaggggagggtggctgcagggcaaggatcagagaaccttcagggggtggggcggggagtgccatttgagctgagacctgaagagtaaggagggaggagccagatggagtgggggaagaggtgtggctattgtagatggagctgtcaggacaagcaaaggcccaggggtgggcggggagatccttctcactgtcccccaggccacccccgtgtggagcagtggttgagtctgcaagtcccatctcttccccaggatcccttcagctgtgtaagccagtgttgcttctccagtcttgagtttggctggaagggatgcagttgtcaaggtgggtactactccataacactctacctaattcactccagatgccccacgccctcactgtaggccatttccccaggcttgcctccagctttgtgaagttgacatgggttgttccccaggaagctgtgctttcccctacaaatcattgagtttgcatttggttgtatccattggaccccatgattctcagccagtgggagtgctgctggtgtctcatggttagagtcagggatgctgctcctcatcctgcagtgcacaggacagtcccccgcaacaaagaatgatctggccccagatgtcaccagagctgaggttgagaagcgcaggtctcaccccactggccactgtggttaatgttcacctggttattcaccaccagaaaggctgccccggtaactcctgttgaataaatttaatcacctaagctcatgtcgtgtatctgcagcatcaaacgtatctcagaaccttggttttatatttcaaaatcttattcttgtttattatcccccatactctgcactttggtactagattaaactacttcagtcatattcacaagagaatctggttaacagaaaattgagtacaagggaaagaaagcatctttcttctaataaattagtgaagggatactaggtatctcctatggcctcagagtttaaaggtgtcaggttttggtttgtttgttctttagctatttgttttttgttttttaatttttttttttgagacagtcttactctgtcacccaggctggagtgcagtgtcgtgatctcggctcactgcaacctccacctcccggatacaggcgattctcctgcctcagcctcctgagtagctgggattacaggcatgcacgtgggtctggctgcattttgtatttttggtagagacagggtttcaccatgttggccaggctggtctccaactcctgacctcaagtgatccacccgcctcagcctcccaaagcactgggattacaggtgtgagccaccgtgcctggcttactttttgtatttttagtagagatggggtttcaccatgttggccaggctggtcttgaactcctgacttcaggtgatccacccacctcggcctcccaaagtgctgagattacaggcgtgagccactgtgcccagtctgttttgttttgttttttaaactgattattaaatcatttaatttcatattggtctgtgtaaatatatttgcaagtgaactttgggtacagttttgctccagtagcattagacaagatgagtccaaatgagattgtcttcattgtgcacttacgaatcactctcctctggccggctgcctctccacactgcagagcaggcctgcagagttggggagccatggtggttgagttccccaagtggcccaggcctcagactgcctctgcataaaagggtgtctgggagaagccgatctaaagcagtaactcggccctatgttaagtcacaaaatatctaaccattacatgcatggtagaaactggtatcttccctgtttctggaaaggaatctgggcagacccaggccgcaaatagtaacgattgggttatctatgctttcagcgatgccatcagaagaaatagtaacactagcttaggaaaaccctctaaatattaggtttaaccatatgaaattgtcaattcttacctataaaaacagcaatctataattcaacctagtacaatatatcatcacctggcacatggtaggttaggttaaaaaaaaatgcctattgaatgagtgaatgaaatcaaccggtgactatagaaaacaccagtctcagcttttgacacagaccacatcaccctcagagaggagaccatgctgtctctccagtttccttttcctttagatgtgagcttcccaaaaacaacagtggccttggaaggggctgctcctggagtctcttgctcatttggtctaagaaggaggctgaggaccagggaccgttgtctgagccaagtctccactccagcacagggcgggggcaacaccccacccaggtaacagttgggcaacgggcacagcaaatcgcagtcctgcttcattaatcctattcattctctttagttccaaaaatacccaagagaatttttatggaaatgacattggatgccaatggtcccaaaaatgcaaggaaaaatagctccttctttgaaatgtctggtattcggggtctggtaggatagggagacgtagtgaagtccaagatcacagtagccttaatgtgaatgttccgcttcagccagagttctcttgggcacttttttttttttttttttgagacggttcacccaggttggagtacagtggtgcaatctcggctcactgcaagctctgcctcagcctccccagtagctgggactacaggtgcccgccaccatgcctcgctaatttttttgtactagagatggggtttcactgtgttagccaggatggtctcgatctcctgaccttgtgatccgcctgcctcggcctcccaaagtgctgggattacaggcgtgagccaccgcgcccggccactcttgggcacttctttacgaaaaccccacataggaaaaaccaggcttccagagtgtctcctgacgtctagttagctattccatttcagagggctccatagcctctcaggaagaatctattctttaaattaaaagctccccaggcatttttaagttgtatgacctgattctcaaaaatgtttcatttataaaaaatgagcatcagctataagatatatatagtgtccgtgcaacttaatgttgggcataccacctcttagaagctaccagctaccatgctgttgttttatgatgtcaacggtgtgtgtgtgtgtgtgtgtgtgtgtgtgtgtgtgacaggcagtgagcagcaactttcaggtgacttaactgcctacatctgtagcttggtgacagtaggtcaaacggtgagttcagggtacagccagaaggcagataaataccgctgtatagaagattctggcagaggctgacagctgctatttccacatctgcttggcacgtcgcttctgagtgatgttgcaagcctcaaaagagatgttccttattttgactcagactatcatgtctttaaaagctgaacagttccttctcttgatgccgtttctctgaactctgacccaggagaggggagaacacttttgatctgccagttttcatcaaggacgctgtttccctcagtgagaggatgaaacccctgacgcccctgctttcccctcccatttcctatgctgtcctgtccccttctgatacctgtccccacacactcatgcacgctgatccactgcgttgcttcccaggccccacccagaaagtgaggaaaggcctgggctgcggtggagcgcaggatgttctctgcggattattcagtgaagtcgagatcttagagaacattgagcataaggcctgcacctatacagctgagggcactgagggtctcgggaaacacagtgatgttctcaagtcagcttttcaaattccgacaagtcctcgttctaggcgtaccatttgatgcacagatctatggacatgtgtgtccataatagccccagagctcctgcctccacagaactggtggctgcatctttggaaagatcgggaaggggcccctcttgcctcatgtgatttcctcactggtggggttaccatgggagtttggagccattggtaaggattccaacacattttcaacgcacaagcttcatgctgacccgccccagccctttgtccttctctcctccactgggcgagtttgccaggcgctcaggcttacttaagacaccctcagtctgagccaaatgtaagaacatgtgctgctgtagcttcccaattttcattcctggcctccagaaaaacatggtgctgtatataacaacacggcttctctgcaagttcagcctaatattttactccatttctctcatcattttggaacattctatttccctgtagaccacctgcctataggaagatagtgattcagacggagcatccacataactgcatctggggaccttatagaggctaaggagcaatccaggatggtggctcagagcacgggttcaaatcccagctctgctacttactagtggtgtgatcttgggcaagttatgtaacctctttgtgcttcagtttcctcatttacatatggagagataatgatgacatctagcagaaaataagcagagaataatagctttgttgctgttgtttttattggagagaaaaggcatttgtgcctggtcagtgagcatcatggaatccaatcaagtgccttctttcattaaaccaaaacagcaggtaggttgtgtgcatttttaagaccttttagaaagtatgcttttatagattaggaatttcagagagaaaagattggacagcttccctaaaaactttgagctatctcattgcaagatttgccctaccaatccgtgcacgaaccctggcccccttcctgatagcaggaggcccaccggtggaagcaagcagctttttaaacgccttcgctgcactcctgcaatgtgcagagacctctggaccaaagaccagagcctactcagcagactcttggttgatgtggacaagctgcctgtgtttcacacggtcgacggtggggaggccaccagggaaaatggaatgtgcagggcttttaaatgtcacgtctggactgtgttggcaggcccatgcagcgctccacaataaacctgtcacaaatgcattgagtcactgggtcctttatttctcatcacggcattctgtggccttgtgttctcttgccagcaaagaatggaacgttcagccccctagacatgccggctgctggattttttaagcaatcatccagcttagataaggggcgtgggctgctggggaatgctgccccaaagcgctgtctccagagcagctgccccaggcatgcttaattccctccctgcccactgtgtgcacccccaagatgcctctcaatatccagacctgcagttccactctgtttgttaggccccccaggagagcgagcctgcagtccgccccagcagaggggaccaggccagggatgcctctttcctctctggagtgttaccttggagtcctgaggccccgtgacaagaccccacacggccgaatcctcagtaacagccctccactgacttggtatccagtgggattcctccctccatcccattctctagggggcagaagcacatctgcccgtcctgtccgcctccccttccatcctgcatcctgtcttctcctctccccgcctcctgctgtgtggcccatgagcccaggagggacccagtctactctgtttacctctcccgctgcccactgagagtcatggctgaggtacatggaaccggcctggtcatagggccgtgctcagcagaacacaagcagaggagatgcctagaactttcaggagcaggtgacaagcagcagagaaatgagtgggggttccagctagtgaaggatggggtggcacagagcatgactgggggccagggatccagccgagaggatggcccgagaaagctctctgaagaggggggatggagacctggctgcgggggaggcacgtccaaagatcaagggggaggagctttctcggcccaagggacagcaagtgcaaaggccagggctgaaggagctgctcctgcccctcacagaaggatgactgagtcttcgacctggtctctctgcacccactctctccttccagcttcccccacgctgcaggcagagagctattctaaaaacatcacttcttatgcttaaaatcatccaggggattcccggtcctccgagataaaagacccgaatctacttggtctgcaaaccctgcctgatctgcccccttctccagccctctaaccttccctctcctcatttattcctatttgtgctgaattttagcacggctcagtcgtcacctcctcgaggaagccttccctaacccatgcattcttctgtgcttgcagaggggaaactgggctgactggttacggagctgctctacaggagcctgctcagtgttctttcttctgccacctttgagtccccgtcatgacccgtcacgaaagtccaggcttttgttgcccccatggctttccaaatggccctgttgaaaacatcccctttgaccctccaaaccactttatggaaaggtccattttcatcatgggagtccctcctcagagagagtcagaacccacatctggtgcccactgtggcatcgtgggcccacgtcagcaggaagggatgggggtgcaggcaggcagtgtgggcaaggagcctcccccagccttagagactgaatgactcaaccccccttgtctacctcccagggatcttgtgtgcccacatgtccaatagggaggtggtgcttgggtccagggacttccttcatcatctagcctcactctgctgtccagtctcacccaacccagaaccttccctccatcatgtcagcctccaccaccaccccagaattcttgagtctcatttaagccactggtaggccccagctgcaaatgcctttgccccacctcccctgcctttcctgcccacctgccttcacctctcccgatttcgctgccacctctcctgctccattaacttgtaacaactcagctcttttctgaattccttatcacacagaaagatgactagatagaaaggctgatacagaaatacatagatactcttacctccccagttagactgtgagctccttggaggcagggcccaaatcttgtggtttgttacatccccattaagacctccatggtaacaacactaatgaacagcgatggtaccttgccttgtgtagttgtcttattgcagggcaccctgcctccctgctgattacaaaccagagggcagggcctacctcccacacgtgcatatccccatggcgcctcactcttgccagttgctcaggaagtgctgtggcagacagtcctgggctgcccttctacctgcctgttgttccacaggcttggtccttcctccccagctaggctgtgaggggcaggacacgtcacagtgttcattctccctgctgcgtgtagcctggaacccagcacaaaacctgtgcttgagtttccctccccaggaggaaaggaaattgtaaacgaggcaccatcgtttacaaaataagttctcatgaaaagaccccaaaacaggaagtgagcttatgaagcataaggattgttcttcatcgttcttataaccaccttcagtactgtctatttatgtatgtatttggttttctgtctcccctaccaaaatggaagccccacaaaagtaggggcccctgcggatctatgcagccgctgtgaatgagcaggaaatgtcatggctcaggttgcctcttgggttcctatgggatcagtttgttaagttaggagagaccgaccccagggagcaggctatgggtgcttagacccttctgaagaaagttccattgagatgagaagtccacctgcccctctggacagctcagagctggtctggcctccagagcttcctgtgggctggggctgtccaggaaccggtcagccaagggtcattttcagagaaggcctggctgccttggcctagactggccactgccatcccccaccagtccccaccagccctgcgctccaaggacaagcacaacctctcagcctgatcttgcaggcatctgctgagagagaaaagcttaaggaccaccctcaggcctgccctttgaaaagccggtggtttcctcctgattccatttcctgacatatcaccagcataggttttattcttgatagggaaggtcaccgtacatcgctgggatctgctgttccattcataagatgagggcgttgagcagagagagtagcctttgaagccatagcccatggctgggggtcagtggtggcagcgtggcctgaggtgcagcttcagagggcccgaagagtggagtgtcagatggtctctgggctcagagagatggcgttctgtggttacagccattgagcctcttggacaatggcttgagtgacctgccatgggctggattcagctcagcagttgtggcagctctcatgatccctgggcctggacggatcagtttccaaatcccacccgcttttcgcgccaggtgtcttgatttccaggccatctttcctctgatctcctggctgtacatgggaaccacacgggagctttgccgataacagatgcctggaccccactccagccagtccggtttagttggtctggggtacagcaggggcactgggatttttaaaaactccttgcgtgaccccagtgtgtggccaaactccagggccacagccccgtccatgccacacacagctgccgcactgatcccctgaaacacagccaagaccttcccagctccgcagccagcgcctcctcgactggacttccccacctgttagggctgaactgtgtccctcagattcacacgttgaagcccaggacatcagaatatgacttcgtttggagataaattctttaaagaggtgatgaagtgaacacgaggctgttagggtgagccctaattccatctgatgggtgctcttaataagagggggaaatgtggacacacagacgctggagatgtgcatgcacagaggaaagaccctgccgaggagagaggcctcaggaggaaccagccctgttgtcaccttgatcttggactttgtatctttagaaccatgaggaagtatatgttgtttaagcggctgggtctgtggcctttgttatggtcgcctgagcagattagcgcaccagcgaggaggaagaggcctccggggaagagcatgagctctagggtcagactccctctgccatttatcaactgacttacccgccctgtgcctcagtttccctgtctgttcagtgggggataacaacagtatagctaccgcataggattcctggtgaggattcaatgagtttgcacatgtgcagcacccggcattgtgagctctgagtggcgttccacctgaacgcccatgactcaccatcacgcagagactgcttccctcctctgcacctgcccccagggctccacgcccccgactccaatttctatttactcccattcttcctccctccatttgaatccctcaccgctgcctgccccctcaccaccgatattagcctgctgaagtccaactcaaattcctcctcccctgctaaatattttcaaatccttctcatcaaaacaacaggcccccttgaattagacctagtatttggccgagtgtggtggctcacgcctgtaatcccagcactttgggaggccgaggcgggcggatcacctgaagtcaggagtttgagaccagcccggccaacatggtgaaaccccgtctctactaaaaatacaaaaattagctgggcgtggtggcatgtgcttgtcccagctacttgggaggctgaggcaggagaatcacttgaactcaggaggcggaggttgcagtgagctgagattgcgccactgcactccagcctgggtaacagagcaagactctgtctaaataacaaaaacaagaacaacaacaacaagaaaaaccctagtatttggctgggcacagtggctcatgcctgtaatcccaacactttgggaggccaaggcagacggatcacttgaggccaggagttgaagaccagcctggccaacatggtgaaaccctgtctctattaaaaatagaaatattagctgggcgtggtggcgcatgcctgtaatcccagctactcgggaggctgaggcacgagaattgcttgatcctgggaggtggaaactgcagtgagccaagattgcaccattgcactctagcctgggcaacagagcaagactctgtctcaaaaaaaaaaaaaaaaaaagacctagtatttgataccacaacagagcaactacaatagtaatttaattgtacatttaaaaataactaaaacagtgtaattggattgtttgtaacacaaaggataaatgcttgaggggacggataccccattcttatgatgtgattattacacattgcatccctgtaccaaaatagctcaggtgcgccataaatatatacacctacaatgtacccacaaaacttaaaaataaaacaaaaaccaacaggctcctccttcatattccaataaaaatgcatttgtactttcattataacatgccagtctgcctttgtacccaaaaaacttattaacaggagctactcatactacaggagagggcacagtgagagcaggaagtcaggggtgggacatagaaggggcctggaatgagctgaagcatacctaccacagaggatgtaaagctgtgccaggaattccagtgcccattatgaagctatgaatgatacaccctttcactctctgaaatgtgcatatttatggaaaattaagagatgatttatccctgagaagaatttgatcttcaccacttctcagcagtaattaaactgcctggcaacccctgtggactggattcccctccttgggagaaaacaaagcttatttggagttacattggcacttttaagcatctgggttacatctgaatggaagcctcccgaggacccagctacatggggcaagatgtgtcaccaggacaggctgggtgggatacctgagctctgctggacccacgagggtctctggtgcctttgggggcattccttcccctctcacctctgtgcccaccggcttctccagaccccattaaaaatcgcatcttgaggatttgcaactccgaggtctcaaggactgataaccgcttggagtgatgccctgtgcaaagtgcctgcaactcagcaaggatccaagttggcctgggactcccaggtctagcaaccagcaggctcccaaaggacaaggacccggactgcctccttctcactgaaccccggggccgagcgtggatgctgcttcacagcaggagtacacaacttcatggcttggagaacgctggggtttcagacatcagctgcagggtaaagggacatagtgtttggccagagaactttcttcacgtcatatccatgtggcttcatctgcttttcctacacgacaggccaccccacacctaccaggagaggcccagggtgttgaagggagtgcagttagattaatttgcccaggagaagccagtgcagctctggggtgcatgggctcacctggcaggagagacttggtccatggggagaagcctgcagtatagatgggacctccaggagcccaagtagcatagaccctgctgatccggggccattgagccagaggatttgggctgaatgtccccagagacaaaagggaaaggtagatcctttcccttaaagatgaaagccatcgcccgggcttgcttattgctctctctcctggtccttccacatgttgtttctgaacatttgttctggcatcacaatccccgtcaccctgtcatctggcccttcccacctttccaccttatctcttgcagtgtctccgcgtcgacctggcacctgggtgaaggcttgctcttgctggtgcccatagcccccagtgtatggtcttgacctccccagccatatggagacccagcctcaggagggcccctcgaggaagcctccccttagcacgaggagttgctcccttctgaggtcctactgtctccaccatcagcacagcacacgggctcttttttcttttcttttttttcttttttttttgagacagagtctcgctctgtcacccaggctggagtgcagtggtgcgacctcagctcactgcaacctccacctcctgggttcaagcgattctcctgcctcagcctcccgagtagctgggattacaggtgcctgtcaccatgcccagctaatttttgtatttttagtagagatgaggtttcaccatgttggccaggctggtcttgaactcctgacctcaagtgatccacctgcctcagcctcccaaagtgctgggattacaggtgtgagccactgcacccggcctgggctctttttttaatgcttgctattttaatttcttttttttttttctcgttttttttcttttcttttcttttctttccttttttttttttttttttttcctgagacaggtgctcgctctgttgcccaggctggagtgcagtggtgcgatcatagctcactgcagcctctatttcctgggctcaggtaatcctcctgcctcagcctcccaagtagctgggattacaggcatgtaccaccatgcatggataattttttaaattttttgtagatatgggtgtctctcactatgttgcccaggctggtcatgaactcctgggctcaggcaatccacccacctctgccttccaaagtactgggattacagacataagccaccaagcccagctgcttgctattaatatttttaatttaattttcctgttgtgtctctcccaagattgtgagtttccctgaggacaaggacagtatcttgcttatttctgcgtctcttggacttcagaggaacttaataaatatttatggaccaccttattgcatattttggcccctttcatacaggaacaaggtctgtttatttgctttgctcaatgggcaacttgctgtgggggctggcttcgttttcaaaattctgcttctcattgggaaaggtagaataattggaggtgtggagatgggtgaggtgcactttttaccctgaatgctctgtagcccttgaaattttaataatcagcatgtgtttatgtattacttttgtaataaaacaagttcttgaaatgatgctgttcatacaaatatcagttgagggaagcaagatgaccttttattggtaaggtttttttttccccgtgattttctccagggcctagactcaaaaaatccttccagaaggccatcacatctctctccatttcgtaaatgtgtctaactaggcaacatctaagggacggcacacagattaggaattttatgtgggctataataggggatcatttgtaaccgcctggagtcatttgcaatattatttcagctgtgtgtggatttcagttagttttgagaatccttctgtcacaccaagatgttcatggaaaaccatttgatgtgttttctcctctcgtttttccctgggaaagggggccagaaaccatgtttatcctaggacccaaaagaggaaaaggccacgtccctccacccctaaagaaaacgcttttatttgaaatgtcttttccatttaccctactttgaataatggagtttttaaactcacttgtttttctaaatattaaattttcaaaggaagaatatttttgagttcaaaatgcctatttcaaatctttaatggttctcttggtctggcattcaccagcaagttttaaagcagcctcccatgggtcaatttgatggctaaaaagatgattccaagccaacatcattggcacataatgtaaagaagactctccccacaaaacttttgcttttcattgtgttctgcagtggccatcagggccatccccctgtctccaggcagggtggtaggtggacctgcgagaggtggaatttggtgggggcaagcagcccagacttgcccagcgcttcccctgacctccaagctccatcagctctgacttgggccttgcaaagtgtttggaccagaggccaacgctacctggagcaggaggccacgcagcagccctccagcttgtccccaactggccccaggctcctgggattcttggacaaatggcccaaatttaccctgaaccttctgctgttgctctggctctgagcttcttcacaacctgcaccgtgtaaaacttgaagactcagaagagcttctgaaatccaaagcaagccaggacttttccccataggtccttctttccgattcctcatcattctacgcgtgtctgctggtccctcgcacctccatgctgcagactggaactctggtcgggttgtcagtttcaagtaacactagtgtttctcaacagggtgctcgtctattggcatttggggtgggcagttctgtgtcctgcatgttgtgggtcatttagcagccctggccagcctgccagattccactatgacaaccaagaacacactctcagccctgggactggagtgggatgcagggcaaacctcagcctttggggagtggggacagtactgacctcaacatggtggggaagagcaccaccttcagcggagggtggggcagtagcaccgcctgctgaggaccaccagtcccccaggttcttagctatgccctggagggcaggagtctctcctcttctgtcctgaatccccagcacccagagtggttagtcctagcctcatagtaggacatcagtaaatatttgcccagtgaatgaataagatctatgaacagtcttcaaaagggcctgtgaacccaatgaaagtgtgccctaaaggtgtgcattgtacacatgtattcgctgcagcaagaacccataacttccctcagattcttcaaggcaactgtggggcatccttaaagggacattcagaaaactggtccagccagtggccactacgggcctgatgtttctgtagctgcaaacatcaccgcaccgtgtttgtgcagtgacttttagagctaccactctgtgtcaatattctaatctccctgcagaagggaccatcctgaacgctccagggactctgcttccgtgagagggcatccaagttgcctaatgcaggggctgcattcagcccttcaacaagaaatggcctgaggcccgggccctttcactcactcacaggagagtggggtaaaaagagggcaggaacaagatatgtttccccccaaactcgagtgtttcttgggtgaccttcccaataaaagtcaaagaactcggagacatcactcagcttgccacaaacccaagctcacacagcagcttggctgaactgaatgagtgagccccgtggcctgcctccttcctgagagttcattgttggtgcagctgttttaataaaagacaatctatgccctgaggcaggaagaacagttgggccaaacccgtggctgagcagagggctcaagctcagacacatctgcagacctgtgcaaaagtgcgagctcaccttgcagccctggagaattctgcttgacctcagggcaggggactctgagtgaggtcgagggtgttgatataatgatgactcatttctgctgctttcccagcattctcctgctggtcttgggttgttcctgtcccagcaagagaagctacagcatccagaaaggacaattggcccagagaacggacaaaaccaagggctggaagcaccacaacccgagagttaacctctaaagcagcaaagcatttgccaagaaatctctgatatcatttggcccagagggatcatacaatttgcagaagctttcagcatataggctagatcagtcatgaccccagataactcccttgagagaagatggaaactcgaggaacccctgctaggccagagcaggcttcttgaacattagtgcgccaaaaaacaatcctctggagagcttgttacatcacagatacccagcccccaactccagagtcacttcagccggggcatctctagcaagctcctaggtgacgctgatgctgccagcctggggaccacgctttgacaaccactggtccccagcagggggttttgcactgtgctccattgtgcccccttgaggggaacagaagggatgggaagaacaagtaaaggggattcagcccggactctcccacctacattcgggacacctctgggtctgtcttccaagtctggcttctgtgattaaataaagaacctctgataaaaaagagaggtgggtccaggcctgcacatgggatgctcccaagaaccaagcctccctcctgctcattccagtgtgtctggggcaggaggctcaaatgttcaaacaaaaccccaaataacaagctaagtgggcagagtcatgagtgagccccacttccagtgcaggcaccatctcagggcagtggagtggcccttcccgtcgggcagccttggcctccatgatggtcttgtgccaggctctctgcagtgggaaggactaccctctctgtggcaagcatgctgctcagctgccccaggggccaggcagcagctttgtccaggagagtgtgcccagtgctgtctggaggcaccctgcatctgcctggtccccaggaccatcagagcctcagcacagccacctcatcctccacaaaccaacctcgacatggataacccatggcctcctggagctcggggatagagcacagcctctgcagcccaagtctcagggtttggctcttgccttcaccacttccaagctgagagacctggggccagtcaacctgtgtaaacctcggtgtcctcgtctgtgaaatggggataattctagtataatacttgagcattaaatgcagttcaccacctgacatggtgtgagccctccagagttttggccaatcgtcattgagtgttttgttttcacattattttcgtgtttctgatgaagcaggagtgtgccgcctgtatcagtttctagggtgccctaacaaacgaccacaaacggggggacttaaaacaataagaatttattgccatacattcctggaggccggaagtctaaaatggaagatgctggcaggtgccagcctcactctgagggctcggggtgtgtcttggtttggaaacacatcactccaggttctgcctgtctgtctctgtcttcttctcataaggacactgatcatatagggtcaggacccaaccctgagtatgactttatcttaatttgattatatatgaaaagactatttccaaataaggtaacgttcacaggtaccagggggtagggcttccacatattactggggaggacacatttcagcccatgaccccactggactggagcaagccctcaggacccagcagccacgaggatcttccgtgtgaagttgtgtgggcttccccagactgtgctaagttctcccaaatggttgtgttttccagggtgttcagacttacatctcttggatatgttgaccccaactgaaagaaagcgacaaggatacatccacgagctcattgtcaccgaggagaactatgtgaatgacctgcagctggtcacagaggtaagggagctggtggggcagggggcacggcagggggcgatgacggagggagaggggagggttccgtcaaggaggtctatgtcctgattctgagcccaagaaactttctgatgtttgaggagcatctggatggcaaatgctataggagattgcgaccgcagagacggttcgttgcttatccatggccaacattgagtcattcccacagagggacagagatcacttagccaagggcaagtgagtccctgagcagttgatggatggagtcatgtgaactgagagtctggagtccacgctctactcagagcagctgcagctcagccaccaaccaggaggtgccatggagccagccacgccgccctcctggcccgcagtgttggcatctggaaatggggggccatctggctgctgtctcgagtcattcctgccatatgttaccctgagacaaacctgtcactgagaatggcaacgtttcctcccaggcccccacaaaagcccctgacctgagtgatgcctcctcatcttgtcagtcctcccagaagggccctggccacctcatccagaactatggggagatgcggagcccggcgctcctgctgctcagcaggccttttgtccacgtccatgggaagatgccatattgggagacagggatttgcagagatggacctgcagtttggagagtgctgtggtagtctggcaaccaccacaccaaacgggtgtgaaaccatcttgtctgatagtcttaacatccaggaaagacgcagcagggctcgccgctgttggaggagtacagggtgggttgttagctgcaggaccaccattaatacttaggaagcattgatgcaaactcaaaaaggtgcccctttctcaaggtgtttgactgttattaaatatgcagttcaggatgtccagggtgcaagtgtcactccttagatatggctcctttttgcactctgcaaaacgcaccaccatatgtggttgccctggtacatgccgggttcaacgtcggcttaaggactcctgtggaataggactcccagggagcagccgcagcccagccaagtttatgtcgaagatgggctgtccccttccctaaagagccttcagaagcgcctcctgtgggagaaaatgacctccttgcaggcgggggcttgcaagtggaacacggggttccactgagatctgtgatttactgagagttgctcaaccacacagagcttggaggggctcattcattttccagagcccaggaggagggcagcactcacccccttgtagcgggcctgcaagtgctgggtctgtccagggtcagcccaggaggctgaggacacagcgatggagtcagtcaccgaggtggccactggcttattagaggagctgccgcctgggctgctcctctcagaaggccctcggtttacctatgcagatgaagggactgtccacagccaccggcacctttaagccccgcttttcacaccggtccagcccctcccagtgcgcaggtgagaccgcttagcctgcgtgcatgacttggtaccggcctccctgcttgtctggtggagttaagacctgtctcctggagacttcagctgccctccttcccctgtaaaacaatgcaggccctgctggggacccccctccggtttccagggcagaggaggggctctctgcttcagaaactgcaggaaagcaggcgttcacctctgggcctctcagccaaggtacagacacctgagccctttccctgctctcagcggatcggcgtgtgagtgtgtgagttttaagctaactgctttctgaactgcttcgttttctgcatctgtagatttttcaaaaacccctgatggagtctgagctgctgacagaaaaagaggttgctatgatttttgtgaactggaaggagctgattatgtgtaatatcaaactactaaagtaagcctctcctctaatccccagcctggcttggcctcctcggctctcatgcactcgcacctctgtgggtctgtgtgtccttcttgcatgctgccctgtgcttctttctggctttttttttttcttctcattgccactcacaaacaccatcacccttttgtgccttcgtgctttctggaaacgcactccgaatctctcattgcaagagtaggtttcctgggcaccccagagcctgctgttgggtgaattactgtggttgtgaatttccagggctagggcgacgctggctcctgatggtgctggctccatgctggggcgtggggctgccccctctacgctttccctcggacgcgggatcccatgggggattattggtcttttgaggcattcttggccctgcagatggaaaaatgtggaactgttcactgcctaacatcagcagttcctcaggatcactccgggaagctggccctaggctggtcgtattttcttccaactttagtttgcagaggcagctccagggccaggagtcaagagacctgggtttggattctgacttactcactgcctttcctttttgagccttagtttccccatctgtaaaatgaaagggttggattcgatcatcacaaagtctcttccaattcttagaaaaaaaaaaaagtcaaaaaccaaaatctgtatccaccacgctctcattgtaacatcacttgctagaacacagattaagtcacagcctgcagggcgcgtgatattccctgctgggaggaagggccacccacttcctgggcccgaggatggagggcaggctccagagccttgcgtccattcctgatcttcatccgtgtcattgggaagtccccatttcctaaatgtggtctctgcattgttcttataaggtaatttcaggtccccactttcctgagcgtgtgtttgggagtggatggagggatggagaggaggtgtggagaggtggacatgaagaaagatacataatgtctgctggcttggtgctctagaagacgaatgatccaaggtgacatcaggcaggcttttagagaaggtctggactccgttgcccgcgccccctgccacccgatgccgtggaagcctttcgaacttaggtctggtgtcacacccttgggctcacatccgctattgcctctggctgtgtgtcttctggcaggtcactttggtccctgggcctcagtgttctcgtctacatagacgatagctgggcacagtggctcatgcctgtaatcccagtgctttgggaggccaaggtgggtggatcacttgaggtcaggagtttgagaccagcctgggcaacatggtgaaaccccatctgtaccaaaaatacaaaaagtagccgggtgtggttgtgggtgcctgtaatcccagctactagggaggctgaggcagaagaatcgcttgaacccgggaggcagaggttgtagtaagccaagatcgcaccactgcactccagcctgggccacgggagtgaaaccctgtctcaaaaaaagaaaaaaaaaaaaaaaaagaaaagaaaatatacctgtaagttaaaacctttttccttgggcagctatcagtgggggctgggggaggcgggagatgtttctgagcttcccaagtagcccttagagagggcttcccccacttcagggttggcctgagggaaactggtgctggcctcagctccccatacctctctgttgtcttttaacccccatctgggaagaagcagcctctttcttgagctgtgtggggggccaggcctgcgtgcttcttcctcctgtcggctctgacttgctccacagttgtggaggtgggaactgacagccctgttacggctgaagcagcaaagctcagagaggctgagtgacttccctaaagtcacacagtagggtggctgctctgtggatgatgcctaggtcccggaatagagactccgcccagtcctgcccccgtggaaaaaaacatgggcccagaagtcagacatcccaagtttttgtctgggctccggccccttctaactagttttgggcattaaggtggcagtcatggtgcttgtcctgcctaccatgcacggtcattctgagagcaagggaatcaggtgtcccaggggcacgccgtccatcagggggctgatgtgtacaggggctgctggcttccctccatcccaaggttctctatccccgttcctctgattcccggattagcttgtttggactaactggctcatgtcttcatcctccagataaaatcttatgttgaaccgtagccttctggggacctgatttctttttcttcttttctgcattttactagaaaaaatctcaaacatacagaaaatttgaaagaattgtagagtgaacacccacatcataaactggacaaaaaacattgtgctgtatttgggtggctgcatagacataatttcttcatgccaaggaataactgtgatgaggggagatcgagggctcctagcagccgagagagggaggcatttgaggataagaagttaaggcagcaatccctggagtgccaccagtgagcggccatatgtctgctactcctgatcctacagtccttgtatttggggggtggggcagggggtagggcagttatcaaacaagtcaacaataaataaataacatgaaaataaaaagggctaactggaacacatggacttcctactaatgatgcctcattgagggttagagcaaatggctggctctcttgcgaggaagctgagacctgagaaatgtgcctttcatagacaaggtagggccagacaggtctagaacctttttatatccagagcctggagcaggaccctcaggacagctgtcagaaatgatggcagaagggccgggtgcggtggctcatgcctgttatcccagcactttgggaggccgaggcgggtggatcatgaggtcaggagattgagaccatcctggataacacggtgaaaccccacatctactaaaaatacaaaaaaatagccaggcgtggtggcgggcgcctgtagtcccagctactcgggaggctgaggcaggagaatggtgtgaacctgggaggtggagtttgcagtgagctgagatcgcaccactgcactccagcctgggcgacagagtgagactccgtctcaaaaaataaataaataaataaataaaaaagaaacgtcatctctactaaaaaaaaaaaaaaaaaaaaaaagagctgtgcgtggtggcgcatgcctgtaatacaaactactcaggagtctgaggcagaagaattgcttgaacccggtgggggcagaggctgcagtaaaccaagatcgtgccactgcacttcagcctgggcaacagagtgagactgtgtcacaaaaaaaaaaaaaaaaaaaaaaaatgatagcagaagggaagcagaagtgaggtggggtgaccaacccaggtttggggaactgttttttatcaagaggctttcctgtcccctcgatggaaaaagaaaagaaaaaaaaaataagagcttgtcccaaaacagtgtttttcttaaatatctgactcatcttctttttaacttaagaagaatggattccattttatcttgtttaagcagaaaatgaaggaaaaataaaaaataaaaatcagtttggggtaatgacagatggtgagaaagaagaagaaaaggatgtggggttgggagaaggagaagagggaaggagagagggcatggagcagatggtgggaagtccagcagggcgggaagtgcagaggctgaggctgggaccagcagggaaaggcttgagggcgagatggcgggagcagggcagccgcgtctgggaagatgggcaggtgcccagagcagcttggaggcagtcgtggcgggaggtgggttggggcctctgaggctgtggtcccaaccatgggctctggagtcagacctgggttccagggttacctctgtcacctattagctctgagacttgggtcaagtcactgaatttctgcatgcctgagtttccccaataggaaatggggataataatatatgtaaaactctgtttgacacataggaagcattaataaatgctagttccatgactgtccacttggtctgcagacttcagagggttacagacactcatgtgttcagcaatcattgagcgctctttgaaacatttgttagccagttaattgccttttgcagttcaagtcctctcatctgtaaacctttctaggagactgccgatcagctcaccgcaagcagagtactcttagggctgtggctgcagcagccgagtcacatgatccctgggcctggtaacaccttgcggtcttcataagtctttgcctatacagtagaccatcctggacgaagacccatgactgaatctaataggtgcctagtccatagtaaatcaggctttaattttaggcctgtctgctggttgggtaactctgttctacaagtgtgggtctgcagaacccaggaactaattcctcaagacaatcactgtctgcagatgctctttcttcttttcttttcttcttgtctccttcatcctttaataaaaaacaggccagcggccggggccgggcacggtggctcatgcctataatcccagcactttgggaggccaaggtgggtggatcacttgaggtcagcagttcgagaccagcctggccaacatggcgaaaccccatctctactaaaaaaataaaaattagctgggcatggtggcgggtgcctgtagtcccagccactcgggagactgaggtggaggttgtagagctgggattgcaccactgcactccagcctgggctacagagtgagactctgtctcaaacaaaacaaaacaaaataggagaaggaaagggtgaaagtactttttattcacttgttaaaaaaactactcctcataggaaaatgatggaatgatggaatttcttcctgtttccattcattgcaagtttataacgtggctatccagggctctcatccccccaaattattggtgtcatcacccttgagcacatttttgctcgttgtggtatttcacaccaacccctcaatggggcagtggcctttgggccatcctgaggacaccaagctgccactgctccccacaccccagaggcagccagtgctgatctccccatgagggcatccacttcaggtggaatcgctgactgctcacaccacatcatttatggtccctaagtttttctccttggcttgcccggtccaagggactttattttagccaaaaatgtgggagaaagaaaagaaagtgatctgaagtttttaaagcctaatataaatattgcagagcttccttggaattcaatagcccgccccgtacctcaaaggcttctccaacatgaccatgaaagcagccaaaggcattcaatagggacatcctcccagccttgtgttaaagtcataggttataccattttgttccatctacccatccatccacccatgatcactaactaggatagctgaacacacccatggcttcatgttgtggtcctgccatgtagtaccttgctgtccttaccgtgtataagctcagtgccatgcccttcttccagatgctggtgttaagggttcacatgttgaagttgggagaggggaagcacagtcctagttaccatagctctgagcactcacactgcaggcagaccccagaacacacacttcccagtcccatcaacacctctcctgaattccaggatatacattttttgggttcattggcccattatcatagtaatagacctcttttccgaactcctcttaatttagttaactcagctctagcaatgaagcagcgaatcacagagatacttcaaacagtcatttatacctggcttttgctgaatctcatgggattattttgccaaggcatttgttttgccatcttaattatgttctttttagccaaaaatcatccttccccatcctctggcaatagcaacttcccttgggcagaagtgtctcctggaaataggatcagtgctcaggccacatcaacctggggctttcaccaccgataatctgtgtagtgaggcatcgacacaggggacccatttgagttgttcaagaaaaaaactccatatttctgcacaagaaaaacaaattgtaacaaacagccactctgccaaagaaaaatgctctggtgctacctctctgtagccctagactcatttctttctccattccttgtctcccaaatagatcctttagtggcccttaaggctgtgcccctcacacacattctgtttctgtgcaacctaagtgtgctgtggtgctgtcagatagcgtgaaagcagggggctcacctcccgtgtttccgtgcagagcgctgagagtccgcaagaagatgtccggggagaagatgcctgtgaagatgattggagacatcctgagcgcacagctgccgcacatgcagccctacatccgcttctgcagccgccagctcaacggggctgccctgatccagcagaagacggatgaggccccagacttcaaggagttcgtcaaagtaaggagccaggctgtgcagagactgggccccagagtggcgatctttgggcagctggatgtgtgaggggctaattcaaaagtctgcaagagtgttcccactagaggccaacagggcctagggtcttggctaagccttaggggactggcactcactggcaagtgtggctgtcaccaaaggggtgggcttggagaggaggggtgaaccctgggcttggaagctttgaaagtgtctttagggatctgttttccagatgctattggtgttatttggatgcatgtttaaatctttcatttcatttgcaaggcccaggcaggtcttagatttcctcttgtgtttaatcgccacatcctcagttctttgctggtctctgcccttcacttgcagagggaatggccaggactcccagtggccccttcattcctttcgcagttggttctgcttgatgtgctcccgccttagacagcctgtgggagtcagtgtgggatgccaggacctcttccttggaggtagcagggatctggagagttgggagtccaccaggggatgtttggggaggtaatgcggatactgctggaagacctgcagctctgggacttggccttggccagtgtgggtctctgctggccgtgctgggccattcaaacagcccccacatctcctggagaaaaaaaggaggaagagaataaaatagcttctgtgaaacaggtatcttttgatgaataaacaacaaaataataataacaggcatatctttggatctcatgcattttggagacaggccatcctcacctgtcctagagtggtgcttgtggaatcactgtggtgaggcacaagcgcagcctcttcttggtcagagcctcatgtgagcttgttgtttctgcctctcatggtgtttctcagcctagacttgccagccaaggcatggggcactctgaggtcattccaaggggagaaagattgctaagaaggaggccttgggtggatggagacgagagagcagatgctgagctgctgggcgccatggaccacctagggtttcagccaagggctgggctcttcctaggcccgagcaagatgagttcattgttggatgcacttgaacttcaggaaagtgctgacaccagcccagagcaggggcctcattgtccctccccgcccctctcctcttcacctctccccacctcctctcagtgggaatgtggcacgtcgttgccagctgcgaggtgttcctggaatgatggtgtccacagctggagcaggtcccggtccctggagacagttatcaggtctcagggctccagtcaatgcagctgcccgtttctaaggcattaaaccagaccacagcctttgacagctaagtggccagaccctgaaactggagtcttgacccccgttgtctgagctcctctttctcagccctgcctggagttcccagaggcacgtgcaggctccactcaaaactagacaatgagatttagcccttccagcagttctggggtgtaaggggaatttttcctctaaccgtatagtcttgtgactcttgttcctgggaatgttataaagtttctgcagacatccagacgaaatattctgtgtaaagccagaatctcatctctgtgcataaggaaccatgcatgccatggagggtatgctgaatccagagtgcagggcttaaccctgctggctgagtcacatctgtgggtctccattctccatctggaaagtgtgtcatcctggacagggtaactagtcaggcccttccaaccccaggtctctcagttgtcatccagataaatgagataatgggtggagagtcctcactgacattagtattgatgtcactaactttggattttgcaagtttcttaagtacatttaaaaacatctcatttcagagattggcaatggatcctcggtgtaaagggatgccactctctagttttatactgaagcctatgcaacgggtaacaagatacccactgatcattaaaaatgtaagtacctgtcttgccttttcaagcaggggacggctttctctgcattggagagggctggggtcatggacaagattcccagtgaacatatctggtaactgttgtgtagaaagcacgagacaacaaggtgtcacagaggtctgcttggtaactcagaaagaaaagctggtttatcacgcaaagagctggctgggcacggtggcccgcgcctgtaatcccagcactttgggaggccgaggtgggcagatcgcttgagcccagaagttcaagcccagcctgggcagcataatgagaccctatctctattaaaaaaaaaaaaaaaaaagagagctaatactgtgtccggaattggtgggttcttggtctcactgacttcaagaatgaagccgcagaccctcgcggtgagtgttacagctcttaaggtggcgcgtctggagtttgttccttctgatgttcagatgtgttcggagtttcttccttctggtgggttcgtggtctcgctggctcaagagtgaagctgcagaccttcgcggtgagtgttacagctcttaaggcagcgcgtctggagttgttcgttcctcccggtgggctcgtggtctcgctagctcaggagtgaagctgcagactttcgcggtgttacagctcataaaagcagtgtggacccaaagagtgagcagcagcaagatttattgcaaagagtgaaagaacaaagcttccacggtgtggaaagggaccgagccggttgccactgctggctcgggcagcctgcttttattctcttatctggccccacccacatcctgctgattggtagagcccagtggcctgttttgacagggggctgattggtgcctttacaatccctgagctagacataaagattctccacgtccccaccagactcaggagcctagctggcttcacccagtggatcccacaccggggctgcagctggagctgcctgccagtctcgcgccatgcactcgcactcctcaggccttgggtggtcgatgggactgggcgccgtggagcagggggcggcgctcgtcggggaggctcgggctgcacaggaacccacggaggcaggggaaggctcaggcatggcgggctgcagtcccgagccctgccccgcgggaaggcagctaaggcccgctgagaaatcgagcgcagcgccggtgggctggcactgctgggggacccagtacaccctccgcagccgctggcccgggtgctaagtccctcattgcccggagccagcagggccggccggctgctccgagtgcggggcacgccaagcccacgcccacccggaactccagctggcccgcaagcgccgcacgcagccccggttcctgctcgcgcctctccctccacacctccctgcaagctgagggagggggcttcggccttggccagcccagaagggggctcccagagtgcagtggtgggctgaagggctcctcaagtgctgccaaagtgggagcccaggcagaggaggcaccgagagcgagcgagggctgtgaggactgccagcacgctgtcacctctcaatactgcacagccttcagatgtgtgaccaagtggcttctaccttgtaagtcagaaaatgagagcttagtcgttgattctttttttaatttttttttttctagaagaaaataacatggaatcacagaaacagtctgtggtctgtgcctttctcccttgactctttcttaaagacaggcccagtgcctctaggccttgattttcttagcagaaaagagaaagaaacgtaatgctacgacctgtcttcagaaggccattgtgaaacactgtattagtccattctcacactgttgtaaaggactgcccaagactgggtaattaataaggaaagaggtttaattgactcagttccacatggctggggaggactcaggaaacttacaatcatggtggaaggggaagcaaacacatccttcttcacataatggcaagaaggagaagaatgggagcccagcgaagggggaaaccccttacaaaaccatcagatattgtgagaactcactcactctcactagaacaggatgggggaagccaccccaacgattcaattatctccacctggtctctcccacaacatgtgggaattatgggaactacaattcaagatgagatttgggtggaggcgcagccaaaccatgtcagacactgtgtgttgatattagatgattgttcttctcctgtcactttgagaaagccgataccaaaagaaaaaagaaagaacaaaattagggtttcagtgtccccacctgtaaaatgagtgaacagatttagatgtcctctgagcctatgtttgtaaaaccacagggagtatagctcctggaaagaggttttagatctggttccttttaatggaaaatggtgtttagaaactcagatgtgggcactggcgtgctcattgctactggggtgattttgttttgtgttcctctcggtggcagagctgggaaatatatgaatgtcttttcatgcacacatatttacatatgccaatgtatatacacatatatttatatttatttctagatccatctatccatgtatattagaactcatgaattcacaccagtacctcctattctaatccaatactgcagaattttttccagcctttccccttctgcctttgtaactccctactctgtgaagagcctggctctcattatcctcaatgtgtttccttatttgctcagtcttcttacatgtgacaaatctccctcccacataagccatctcctcagtccagccccagctcaactccacaaaatacactgtggatctttggctgagttaaatacttagttttgaagtaagttttcaacttactgttttctctcttccaacaccacagttactatttaattagctcagtacttctcttttttctcccaatgtttaattgcaaattgaagttgaaaacaagcttttaaaataggtgttctatatctagccaatgggagaaaaactaaaacaagaaaaggactgcatggcccaaatatttaaaagggggaaaaaaactcattatttgcagaaacacgattgatttcttccagagcacccacaaaaatgaactgaaaaccagctgaactaagaagagaattgaaaacagtggtcagctatgagatacatatgaaatctgctaaagtactaatactaaatatttttatgatactgatgtggagaaattcttagcatggtctcaaagacatgctaatcctaaacttaaaggatttagatcatagcaacctaaaaaatacccaaactttcatctgggcatagtggctcacacccataataccagcactttggaagaccaagacgggtagatcacttgaggtcaggagttcaagactagcctggccaacagggtgagaccctgtctctactaaaaacacagaaaaaattagccgggagtgatggtgtgtcaggtttgaggcccagctgaggtctgaggggagtgggtgaacgtggggcagggagctggaagaacacttgagagacagcaggtagatgggacatggcacagaattgtgcacctgcactctaatccccctgagtcatgcaggctgtttacatctgcgtatgcctgcctggttgcagcacagccatgttccctacatgatgtgtatctgtaatcccagctgctcgagaggctgaggcaggagaatatcttgaacctggcaggcagaggttgcagtgagccaagatcacaccacagcactccagcctgggtgacagagtgggactctgtctcaaaaaaaaaacaaaaaacaaaaacccaaattttattctggggaacaacgtatatgttcattaatgggaatggttaaataattatggtagatctgtactatgaaaatatttaaaaagatacagagcaacttctactcatgtattagtgtggaaagacactgagaaaatgctgttatgtgaaaaagcaacactaaactcactgagcaatcctatggtatgatgcattttgcaagaagaggggaaagagctatgattgagtcactgcactccagcctgggtgacagagtgaaactctgtctcaaaaaaacaaaaaaaaaaacaaaaaacaaaaaggccggatgtggtggctcacacttgtaatcccagcactttgggaggccgaggcaggcagatcccgaggtcaagagatcaagatcatcctggccaacatggtgaagcccgtctctactaaaaatacaaaaattagctgggcatggtggtgcatgcctgtagtcccagctactcaggaggctgaggcaggagaattgcttaaacccacgaggtgaaagttgcagtgagccgagatcgcgccactgcactccagcctggcgacagagcgagactcagtctcaaaaaaaaaaaaagaaaagatagaatatagaacttgaagttgctgagaggcagtaggcagtatggaatagcagtgaagagcacatagcctggagccaggctggctggggtttgaatcttgctacttaaccactgtgtgctcttgggcaagttgggcctcagtttcttgtctgtaaaatagggacactgatagtacctactgcatagtgatgtgggaattaactgagttaatgtatgcaaagtggctcatactaggcagtatataaatgttagttttatcattgagaacacttatgcgctaaatgtacaaaaagttcacactcacaggtaataaaagaaaatacataacaaaacaagaaaatactttgattttggcttgccagatgagcgtatattgaaaagattataggtcccagtgttggcaaagatctgggtggaagttaaattgatacagccttttttggaaggcgattatagatcaaactataattcctctttggctcagcaattccacctctaggaatttattctaaggaaataatttaagaaatattgaaaagttggaagcaacataaagttttatgggaaggtaactatttagacgcattgtgctcaataacgtgctcaatgaatattggggtctaccccaataatgatatattataaaaccctcaaaatgataatatgtatgaaatggacatggaacattgtactataaagcaatgtatgaaatagtacagtataaaatggtagtttttgtaaaatggtagtatgatccaatttttatttttatttttatttacttttttttgagacagagtctcgctctgtcacccagtctggagtgcagtggcacgatctcagctcactgcaatgtccgcctcctgggttcaagtgattctcctgcctcacccttctgagtagctgaaaccacaggcaggtacaatcacgcccggctaatttttgtgtttttagtggagacggggtttgaccatgttggccaggcttgtctcaaactcctgacttcaagtgatcatcctgcttcggcctcccaaagcaatttttattcttgaaataatggggagattattagtgatttttaggttctttataactttttgaattttctaaattttgtacattgtacaatattacttttgtcattagaaaaattgataaacctgtttgaattttgaaactaaacaaaacaaatgaatttactcaagccagctgggtgggttcctagcctgtagtagtggttctcagatttgactgcatgttagaacatctggaaacctctagaaaacccctaagcctgagtttcaccctccagggattttgatttagtcatggatgaggcctcagattttccaaaaggattctaacgtacagtcaggattggcccagaggttggggttgttgcttggaattgatttgtggactcacaagacatagaaaacagtgtgtgtttttctccatttgagcatctacttaggactttaaaccacggtatgcctttgggataagatattcagagtcagggccatttacattgtttgtatgtggacaaggcctgggcaaatatgccctcggcattctcctggtacacttcaaaggtggcttagggtctttcttcattctccagcacagggtgataattgtttttaggggcctggaagtcctttgaggatctgatggtaatcactgttgcttattgagcactttctaagggccaggtgctttgccaagaggtccacgtgtctcatttagttctccacacaccatataaaggaggctattaacctctccatttctcatgcgaggaacctgagactcagaacatttatgtgggccaggcgtggtggctcacgcctgtaatccccgcactttgggaggctgaggcaggcagatcacttgaggccaggagtttgagatcagtctggccaacatggcgagacccccgtctccactaaaaatacaaaaattagctgggcatggtggcgcacacctgttgtcccagctactcaggaagctgtggcaggaggattgcttcaacctgggaggcagaggttgcagtgagatgagatcgtgccactgttctccagcctgggtgacagaacgagacaaaaagaacatttatggctgggtgcggtggctcgcgcctgtaatcccagcactttgggaggccgaggcaggcagaacatctgaggtcaggagttcaagaccagcctggccagcatggtgaaacccccatctctactaaaaatacaaaaattagccaggcgtggtggctgtagtcccagctactcgggaggctgaggcagaagaattgcttgaaacccgggaggcagaggttgcagtgagccgagatagcgccactgcattccagcctgggcaacaagagcaaaactccgtctcaaaaaaaaaaaaaaaaaaaaaagaacatttatataaccaacccaaatcatgggtggtctgtggtggggcagggatttaaattcaggaggtccagctccggagctggcattcttagccaccaccccaaatggtctgcttagaaaagcgcacacttgctctgatgcacccgtctgcatgtggttccagaggcgcgtggacccaggaaggagccacccttgctgcagccaccgctcctcttatgccccaggctgcatgctaagcatagactgcgctgtccctgccctgccctccaagggcacctgttggctcttagaccctcatcagtgggttgatggaacactgcacatcaaatgccagaattgcattgtatgttccccaagtgagtgaacaggtgggaaaatagcacggaactgggcctgggatgcctgggctctgctcctggtctcagggactagtttattcctctgtgaaacagggtgaatattttctttttctttctttttttttttttgagacggagcctctctccgttgctgggctggagtgcagtggcgcaatcttggctcactacaacctctgcctcctgggttcaagcgattcttctgcctcagccccccgagtagctgggacgacaggcatgcgccaccacgcccagctaatttttgtatttttaatagagatggggtttcaccatgttggccaggatggtctcgatctcttgaccttgtgatctgcccaccttggcctcccgaagtgctgggattacaggcgtgagccactgtgcccggccaagggtaaatattttcaaagagaaactctaagggccccatggttatatgtacacactgtgatcctgtgagtctgcatgtgtggcttggggtccaccctgcgatgttaacattttgccggacagatcacatagcttgccctggacattcagggtgtggggctggactgagacctcaaggatgggaccattcactgcttcccgcaatgccacccactggagccatcaaggagtggccgtcatctgctacgtgattgccatgtgggtgctcagagctgcgattgctcaagtgggcgccgtccatgaaaggatggtgccctgccccgctgggcctggtcctgcaggaccctggatcacaggcccgcccacattgcctaaaaggaggtggttgtttttattctcctgtgtagatcctggaaaacacccctgaaaaccacccggaccacagccacttgaagcacgccctggagaaggcggaagagctctgttcccaggtgaacgaaggggtgcgggagaaggagaactctgaccggctggagtggatccaggcccacgtgcagtgtgaaggcctgtctgaggtagccaaccttggggctgggccctggtctcccccggcagagcctcgcctgccagcctggaggaggacaaagaaaagcatgaaccattctcctccccagccgatagcatcctcatttccatccagctgcttctcatctgctgtttcatccacccactgagtatttatttatttatttgagatagagtctcactctgttgcccaggttggagtgcagtggcaccatctcagctcactgcaacctccgcctccccggttccagtgattctcctgcctcagcctcctgaatagctgggactacaggcacacgccactacacccggctaatttttgtatttttagtagagatggggtttcccgtgttggccaggctggtcttgaactcctggcctcaggtgatctgcccacctcggcctcccaaagtgctgggattacaggcatgagccaccgcgcctggccatccactgagtttctaatttaaattatatcatttcccattgccagaagttctatttattttctcctgtctgctgatttctttctttctctttctccctttttctttcctctttctttctttccttctttctttctttctttctttctttctttctttctttctttctttctttctctctctccctctttctttctttccttccttccttctctctttctccttccttcctctcttctttttctctttctttccttctctctctctttcttctccttccttcctctcttctttttctctctttctttccttctctctctctttctttctccttccttccttccttccttctttccttccttcctttctccttctcttctcttcttttttcttttctttctttcaacaggatcttgctctgtcacccaggctgctggaatgcagtggcacaatcccagttcaatgcagcctggaccacctgagctcaagtgatcttcccacttcagcatcccaagtagctgggaccacaggtgcatgccaccatgcccagctatgctggtttctttcttgtatcttgttttttgctcaaatgttaatccttcttatttatttcttaacacattttaaacatagatattcctggccaggtgccgtgactcacgcctgtaatcccagtgctttgggaagtggaggcaggaggctagtttgtgttcaagatcagcctggaaacagagtgagaccctgtctatacaaaaaaataaaaagtaaattagctgggtgcagtggttcacacttgaggtgggaggattgcttgagcccaggagttcaagggtaaggtgagctatgatcacgctactatactccagcctgggcaacagagcagaatgtgtctcaaaacaacaaacagatatagatatagatgtagatatagatatagatatagaacccataacctgaagttatgggtgttattgttttgtctgttgtttctgccagctcttgctaaacttactaccttgtttcttgtattacgatttttgactgtgaactaaatgttccttagaactttacctgtgggcaccttttttttttttgaaatggagtctcgctctgtcacccagggtggagtgcagtggtgtgatctcggctccccgcaacctctgcctcccaggttcaagcagttctcctgcctcagcctcaaaagtagctgggattacaggtgcgcaccaccatgcctggctaatttttatatttttaggagagacagggtttcaccatgttgaccagtctggtctcgaactcctggcctcagaagatccacctgcctcagcctcccaaagtgctgggattacaggcgtgattaccgcacctggcccacctgcaggcatctttattgtctgaagttgtattccttctggaaggactgttattgtgattatccaaaactatgtttagaggggtttgggcatcacagcccttgtgtgaatcgtggttgtaaacttgcgtgagagctacctgataaagcacacattctcagggcacgttttccttcactacaccaaggtcaaaaacagaaatgttttattgctcatcccctctgagcttgagtttacctgtcactcctcctctgggttcatctttttgtgaagatctcctagtagacccctcacgttggctctggatgcacctgtttctgcaccctatgtagtgagtaaaatgcaaggtcagcgtcagcagattcaagagagaccctcaaagctatagtggcactggctttcggtgatcttccaaggttcctattttcattctgttttcagcctctgcaaatttcttactttgtttctattttgtgtgtgtgtgtgtgtgtgtgtgtgtgtgtgtgtgccagttttcttggagttaaaaagtggatttttgcatttttctgtttttttaaagtttttgttgggtgagtcattctgagtatctagtccactctacttccagcaacagaagtctctctctgtctctctttctctttctctctctctttgtgtgtgtgtgtgtgtgtgtgtgtgtgtgtgtgtgtgtttgttttagtcagggtctcactctgttgcccaggctggagtgcagtggcacaaactcagctcactgcagcctcaacctcctcgagtgattctcccatctcagctttccaagtagctgggactacaggcattggccaccatgcccagctaatgattctattttttttgtagagacaaggactcaccatgttgcccaggctggtctcaaactcctgagctcaagcgatctgcccgccttaacctcccaaagtgctgggattacaggtgtgagccaccacgcctggccagaagcctctcatttggtttctaattttcttcttttcacttaacctttcctttggtctcattcattctttttgcccattttttctctctgtttctgtatacacatgtgcttgtgcctgtacacacatacatacatgcatgtatgcacacacatacaccattcactagggtttcccaaaatgaccagcgagaatgtgtctccctcatccactcctcctgtggtttcttccctctcataagctgcaaaggccatcaccacctgagggagtcaccatgactggttcctccacggccccatctcctgtccaccttcagtgttggtgtgggatgagcaaaggtgtggaagcagccccgtggaagccgagaggacagctgtgggctcccattttgggattttgtgttgctctgctgtcagtgggtggctcatttattcgctcatcatcattcattcaataagcacttagtgagtaaccacccatgtgccacggctcagtactaaaccctgggacataaaaacaaataagatgtgactcccactctcgaggagcttatggtccaggaggaagctgggggttaaaccaacatttacaacaagatgtgaggggtaaggaggcagagctaggtgccaagtgctgtggcgacatgtgacaggagcaagggacagttgtacgggggactctcgggccctggaggtgatgcttgactgcgtgttgcaggatgaagcattggaggcaggccaagcaccgtgtctcaggcctgtaatcccagcactttgagaggccaaggcaggaggatcccttgaggccagaagttcaagaccagcctgggcaacatagtgagaccctgtctctacaaaaaatgtttagaaaactaaccaggtgtggtggcatgcacctgtagtctcagctacttgggaggctgaggcaggaggatcgcttgagcccaggagtttgaggctgcagtgagccatgatcgcaccactatactccaacgtgggcaacagagcaagaccctgtctcagaaaaaaaagaaagattgaggcagggcattaggagtggaggaccattctgagattctgagcagggcattggtgaggattgcagaggaatgatgggccacagggctgcagggcaggctgaggcccagccgaggaaggcctgtgtataatgcaaaggaacattaacttgatcctgaagacaagggactcaagcagcccctgcactgccacgcagaaatgccgacacacagtcatgtgcactttagaaagggcccttccccgactctgacagctgccatcagagggacacagtgaggccgggatctgaagatgttaaagtaaaatcagttgtcatccttctttttttttgagacagagtctcactctcttacccaagctggagtgcagaggtgcgatctcggctcactgcaacctccacctcatgggttcaagagattctcctgcctcagcttcccgagtagctggaactataggggcccagaaccacacccagctaatttttgtatttttagtagagacggggtttcgccatgttggccaggctggtctccaactcctgaactcaggtgatctgcccacctcggcctcccaaagtgttgggattacaggtgtgatccactgcatccagcctagttcttgtgctttgattttttcagcttacatcccccctttgccatcagatggctgtccttcttggtcagtcttcctggctatcatgcacagcgtcgttgttgtcttgatgatgttcatggtgatgggaaggggatgtgttgacttctgtctcctgacctaggatcacggtgtggaccatgcgtggcccaggtctggacacacaccagtgattaagtttcaaacagatgctgtttttggcattcctgtctgaagatagagaagtttaaatactgttcccagttcatgcatattcagtgttatcttggccaattagaggctttgagtatgaatgaacgagagcacctttatgtcattggatccaatgacacttgccttctctggattatttgcgcccacgtggcttgaaccctgtcttggcaagcaggaagggctggttggtctccaggctcctgcctggagtgcagaggtgaagaatgttctttgaaggttcctgttgtggcaccaccttcggtctttcttgggctctcagaccctccacaggaggtcagaggtcatctttcctcctcgtggctgacagcagagtgcagtggcccctttccagctgcctttagctctccactcacagaagtgccactgtttctcctgtattggagatggacaggtggccatcagcttcttttgggggacacatgttacgaacctatcactccttcacaaatactctcttcagagaggggtccatagggctcgtagctcaggacagagctccggagcgccccccaggccaattgtgtgggcagatggggagcgtgaggggctggcctcggactgggtcatcttactcctggcgcgcagccatggccttgctatccttggcctctccccttgctgtcaaaaagggggcctctgtgggatcatctccacctcagtgccctctgccccttcagaacctagtggaggtgatggacccccgagaggtgttagagccgcgtttcagcgcccaccgtgtctctaagggtcagtggagggagggagctgttcccttcctgtttgctgagcgggtgagtcgggtgaggtttcatgtgcgcagtacagtgtctgttctgtttggcactggagggtcgctcaacaccactgatttacagctgggtatggtggctcacgccggtaatcccagcactttgggaggccaaggcaggtggatcacgaggtcaggagattgagaccatcctggctaacatggtgaaaccccgtctctactaaaaatacaaaaaattagccgggcgtggtcgcgagcacctgtagtcccagctacccgggaggctgaggcaggagaatggcgtcaacccgggaggcggagcttgcagtgagcagagattgtgccactgcactccagcctgggcgacagagtgagactctgtctcaaaaaaaaaaaaaaaaaaaaaattaacaccactgatttgtgcagtcacacacatgccaggggcccggactgcagttgtgccttggaaggcagcatttgtccatggaattggagagagacgggggctgctgctttccagaagctcaaaggactgtctgaatctgtgtggggttttctccctggagctgtttcatgcacagaccctgcatagagcagggagtccccaaggtgggagccaggtgggcacttttctttctgctgccccatttccccagtaaataaaaaagagaaatggccaagcccagtggctcacacctgtaatcccagtattttgggagcttgaggtggaacgatcgcttgaagtcagaagttcaagaccagcctgggcaaagtagggagaccccatctctacaaaagtttttttcacatgtgttggggggctgagatgggagaattgcttgaacctgggaggtcaaggctacctgaactatgatcacaccactgcactccagcctgggcaacatagtgagaccctgtctcaaaaaaaaaaaaaaaaaagaaaagaaaaaacacaccagttgcaccataagacactggcatgctcctagaggaaaagccttagaaattaccattgagactcttcttgatacttggaatcccctgaactgtgcctttgtctgactttgatctcttggctccaaagtcttcaaagctatccttgacttttgcctgagatccgagtctgctggggcctggcctctgattctgatggagcccatgctttcagatgcggagaaacaaaaatgctacactttgggttttgttttcctttctcagcaacttgtgttcaattcagtgaccaattgcttggggccgcgcaaatttctgcacagtgggaagctctacaaggccaagagcaacaaggagctgtatggcttccttttcaacgacttcctcctgctgactcagatcacgaagcctttggggtcttctggcaccgacaaagtcttcagccccaaatcaaacctgcagtataaaatgtataaaacagtaagttggattctagattttgcattatcagggttgacgtgtttggggaggaagaagtttccaaaaaggaggtagagttttagcagggtcaggggctgtggcatgcaggagaaggccaggagttgaaatgcgatttagggtgtccggagtggaggacgatccatatcccgccgcagtgtcagtgacactcagtgctatcggtggaacatattggctgccaaatggctgctgtggtcccctgggatgtgacagaggcatgctttagcctgtaggagcgaagtctagggtacagatgaggcaggtgtgaaaaagctcgggagaagaggtgcaaaacagcacccagggcccaccgtcgcctccaaacagtcctaagtcccctgccagacttctccaggtagcttgaaacatccgagccccctcctttctagcaaagtctctctaaacagttgatacgtggagaatttccctcagctgtttatatggtctgctcatacgtgcatggctgtgtttgtgtgtctttgtgtcacgggacgttgtttttctaaatttgtctgcatgggggtgtttttacagaagaattttctctgaggcagcagttagctttattatgggaaaaaaaagagctatgtagttatatagttactagaaacttcatgtgaaaatctttggagggaattgcttgatgtaaagtggatgaaaactgctgtttagaatacaccaggaaaagcgacaccagccagatcttattctgaaagacttaaaacatacccgcaaaatcgtgggcgggggaacccatatttatcatatttataatttgtaatatgtaaaagttgatgctaacccaaaattattattctgggattctttactggaaaacacacacgcccttagtctggtttactggaacacacccagaaacacacacacatgctcagtctaggttactgaaacacacgcacgagtgtgcacacacgcgctgacttgcagtctcgtttactagaacacattggcataagtgtgctcacacactcacggtttaccggagcacacagacccccagcctcgctttgtaatgcctgtgtgttactttccagcctattttcctaaatgaggttctagtaaaattacccaccgacccttctggagacgagcccatcttccacatctcccacattgaccgcgtctatactctccgagcagaaagcataaatgaaaggtgagacctgccgcctccccagcatgggccccagggctccacggctctaggacacacaaggggcgggtgattaatcaggtgccaatgtttcccaagtggcaatgccatcacccctagctgggagtggggatggggctattacttttttctacagcctctcaaaaatctgtcacatggcatgccctttccaaaataacatggattcaaactaattttgcttgagtttttttttttttttttttttttaaggcagagtctcactctgtcacccaggctggagtgcagtagtgcagtcacagctcactgcagccttaacctcctgggctcaggtaatcctcccaccctagcctcccaggtatgtgggactacaggcatgtgctaccaagcctggctaattctttatatttttttgtagagatgggttcttgccatgttgcccaggctggtcttaaactcctgggctcaagggatccacccgccttggcctcccagaatgccagaattctgggattacaggggtgagccactgcacctggcattgttgttgttgttgttgttgttttattaagaaatgtttcgcattctttgaggtaaacagagcatctcaggtttcccctggcttcccaggtggcagaaaccaataggaaagtaatttcggggttaataggaccacgcaaacccaaacctctcctcaccttggctgacttaaatgggcattctggaacctagggctgtgggtattttgcttcaatctgtcttcaagacactgccctggagccaaatgaaatagatcattttctgaagggtgaacttgacacaaggccagcatcattccaaagagcatttgcaccaagcaagaaaattggctaaagcttttgtgcatatggttctcagaaaaaatgaaggagaaaaccgcggccacaaatgccttcccccaaggcgttttggtctttcgtgtgaagtggttcccaatctgggaagtggtttttgttctttctttgcgtgatttcataagcgagatccttctggctttgttggattaggcaaatatgtgctgctcttcggtaaggaaggaagaggagtcgtgtcccgatgttgcctccaagacagcatctatcacagattttcttccccggggacatcatcgcaggtcttgaggacatccatggaaatggccctcatgcctttcttatcgatggcaggaataagtattagcgtcacgtgacataaaatcagattttctttcccgagcctttgttgttaaaatcaaatgaacaaagaaacagagtcctggcaacagtgtttgaacagacctgaagcctttttcctgagtttctgtttggcaactttctgtctttttctgtccaaggactgcctgggtgcagaaaatcaaagctgcttctgaactctacatagagactgagaaaaagaagcgcgagaaagcgtacctgggtaatgcatggccccgcggggtgtcctgcacagctgggcaggagggagggccatttggctgggctgaaaatcctcagaatagaagaatcccctggacctagaggaggggcatggaatgagatggaagtgagcttggggtgggatgcagatggggatggagggcaaattccaggagcaaggaagcaagtgtttaaggagagggaagaattacttttgagtcgggagaggtacatgaaatgcattgtgaggctcacagagatgggaaaggtgtggcacgttcaaatgaagcattttgtgtttttcctgccgtcatagtccgttcccaaagggcaacaggcattggaaggttgatggtgaacgtggttgaaggcatcgagttgaaaccctgtcggtcacatggtaaggctgtgaggcgcccccggctcctgctttggggttgggagtagggtccgggttccccacacccccacctggctctagatcaaatgtgctatttccatactccctgatctccttccagaattggtttaactagcacttgttaaaaacctggaggttttgtgtttttttttccatcctttctaccattctgcttctccgagggatctgagtggctgcattcacagtggatgtgacacaagatcaggccaaagtaacgagacaggaagggcctagtttcaaagcccactcaattaagtatttgtttttagtttaaggatgaagctgacttctgggagtttccacccggattctccaccgaatgacacttattaagcatagcagttattaagagtggggagcggccgggcatggtggctcacacctgtaatcccagtgctttgggaggccaaagcaggtggatcacctgaggtcaggagtttgagaccagcctggccaacatggtgaaagcccgtctttactaaaaatataaaaaattagccaggcatgggggcagccacctgtaataccagctattcattcaggagactgaggcaggagaatcacttgagctcaggaggtggaggttgcaatgagctgagatcataccactgcactgcagcctgggcgacagagcaagaatccatctaaaaaaaaaaaaaaaaaagagtggagatcaaaatgaggtgtgagttccacctggcgaaggcttttgttccctccaggaaagagcaacccgtactgtgaggtgaccatgggttcccagtgccacatcaccaagacgatccaggacactctgaaccccaagtggaattccaactgccagttcttcatccgagacctggagcaggaagtcctctgcatcactgtgttcgagagggaccagttctcaccagatggtgagtggaacgcggccctgtggttattcctccttccctggcactcgtttgcgtgggttaatgttttcttacctggggacttggtgccaggattccttcggtttccctcctgagagatgaggctggctggcacaagacgaggctctgtctcccctggaggagtcttctggaggcgtctcattgcatgtggacagagcatgcttggtctagaattgtgccagctgccctgggcaaacacgtccatcttctgctttccaaagcaggtgactgtggagaggggtgtgtttaagagcctcagcatagttcttcagtccttggcaaaaagctgtgctggcaatggatgaaactggccaatggaacaaggatgttagcccacaacaggagccgcagaatgggccaggtccctttgggtggcatttttgtaccacttattaagtaggcaaagggatgcagtcatgttgaatgaatcatttcttcagccagccttctgtttctgcttgggcctggaaaagaatagtctcagcccaatgattccaagaaactacctgtctctccctcaacccaataaaaatcaccggtgggcatggtgctgcaggcctggaatcccaacactttgggaggctgaggcaggaggatcgcttaagcccaggagtctaagaccagcctgggcaacatagtgggaccttgtctctacaaaaaaatacaaaacttagccaggcatggtggcatgcacctgtagttccagctactcgggaggctgaggcaggaggattgcttgagcctgggaggtcgaggctgcagtgagccatgatggtaccactatattccagcctgggcaacagagcaagatcctgtctccaaaaaaaaaaaaatcacagagtaagttaaaagattatggtctcaacttaattataaccgaagaagtgagggtcaaatgctagcattatctgtacaaggtttaaatggctccatatggccttcatcttttagtactttttatatgaattatctcattgtgagttaggtactcgttgtggtagctggttaaatgtttgagtgtgactggaacagtttggctcccaagtctgggctcttaactactatgtgtactgtcaacttctaattcttttttctttttattttttttatttatttatcttttttcttgttgttctcgctctgtcactcaggctggagcacagtggtgcaatcacagctcactgcagcctccacctcccaggctcaagcaatcctcctgcctcagcctcctaagtagcagggatgacaggcatgaaccaccatgctaggctaatttttaaaaattttttgtagagacagggtctcactctattgcccaggctggtgtcaaactcctggactcaagtgatcctcctgcctcggcctcccaaagtgctgggattacagacgcgagccactgtgcccggccaccttctaattctgagagataaaggttggggttgggtttttttttttatttaagtaatgaaataccatgacacattggcaactccgctggggagcgagttggaaatcctagtgttggtttacatcagagcccagagaagaagggagagcataacagttcatcagggggtccccaatatgccagacatgtgcctcgaagagagggaatggtccctcttaggagggtctgtttgttctcttttcagattttttgggtcggacggagatccgtgtggcggacatcaagaaagaccagggctccaaaggtccagttacgaagtgtcttctgctgcacgaagtccccacgggagagattgtggtccgcttggacctgcagttgtttgatgagccgtaggcagcgggctcagggtgtgctcagcagggtcccagcccacggccacacatgctgtctggaaattgtattccttttctaagaaaccaccatttggtattcagtcacagggatatgggatggcaaagacaggcccctcaaagctcctaggaatcattctcgacaatcctccctgccccgaaacaatttcctgtttcatgaaacaaagctgtgttttcctttgtcctcactacaggtctcattatggcttctagggtcgctgaaatcccatagccctcaacagggtgcagctgggagtctagccccttcccgggcttgagggatgggtctggttactataaaatagatttataaatgcaatgtctatatttttggagaactcatgtaaccctcctgtttcttacatccaccagtccccaagtagacttcttggcctacaatgcccagtccttggtgtgagtttagaaacaattatgacggtcctgtcattgcttcagaatcccatctctcctgcagggaaatgctgcctagagctgatcactcggtgagacggtctgatcaggccctggcttagctctttgaagagctggtctatggaagtttccagcatgtgcaccgttatagccgttccttccccctctaggccttgtattaatatatgtcaatgaaaacacactggtgtattgttgcgtggattcagttctgattcccagcatgcttagaatatggtcacagaaagtcattatctagaaagtcacccctctgctggatcagatcactacaggtcactggaaaggcaactttacaatgttgggtcactgggtctcggttggcagccatgttggaaaaatctcttttggctcggaggcctgtgatatttcatagcagcagtcgttgctggtgacctgttctgtgcttgaatgtgctgaatcctgattgttgtaggacatttcaacagctctttttggtacgttccccaaaaagccatgtcctagatccccaaggcgtgaaaaggaaaaatatcaagctggaggttgggaaagaaaatgaaggcagtccattatgtggtgggtgaaagaccctaggaggatgcaagccccgcacatcccggggcaaagacctaagacacttttccaccctccaccaccccaacctcacataatatgcttgttgcaagagtcaggactttatgactatgtgccaagctgtttggtttgagttctttaatttttttttcccttaaatgccaggagatcatctggttagttagatagtaacttgatttgctaatgaaaagtgggggccgtgttttgtttgcatgttaatattctcataatcctagtttgttgtggtcatgaaatgtcctttgcatgttctgttggtactggagtctagctttcctgtactagatggtgttctctttgattgtaggtccttagactttaattagggttatcaaagtgctttctaaatgatagcatcagcgttgtggcagagtacctcctttgctgggaactgaatgtgtagtgttatcatttcccatgagagcccggtcatacttcaagcaatttttttaaaagtgtgtgttggaaaggacaacaaagtttacatttcatacttttaagaaatactttattatttatttattgaagatagtgtagaattttgtatcaagaacaacagacataagtattttttgaaacaagcaaatataccctgtagttagaaactttcaactgaacatgttagagaccaagtttaacttcaggcatgcatttgtttaccatttcccagcagaaaacatggttaaaatactttaagtttatattttttgatgttgttaagaaacttttaaattaaatctataaatagacatgcaactcatgctttcctatttctataaccaacaccgtttgtttagtgtatttatgaaagatatgctaccatggtagaaagaaaagtattcaatgtgtaaatggggtagtgtgggtcaccattccgatctctttttgttttctgtcctgtcttttcttcattgactttatttgcgtgttaatgttggacatcattgttcatgtaggtagcgtatggtatgcacaatgacaaacaatcgttttaggtcccaggtcacccactcatagtgtcctattattggaattaatgtagcatgagaaagcaatatgtgactctttttcctcaagtgactctgttgagcatccttgagatgctcctgccatgtagcaagttctggattagtgtccttgtatttactggtgtaatttgtaatgtaaccaattgtccgtatggaggagtcgggctggccctcggacccagctgtgattcatgagttgtgtcacagggattgagaaacatgggtgatgcatggagtctcaaaccattgggcctctctgttccttcacctctaccttcttgaccacctgggctatatttcatagaaattaaatgctccttgccaacaaggagtctgtctcctagctctttgttttctaaatataggagttctctaggccactgcatcccggcatcctgatcccagccttttagacacccctgcaagcgttcctctgctctgagccacactgctagcttctcctgcacactctgatctcctttagcccaagaaggggctgtgctggtcatagggttatgctgtaaccctcagtcttccctgagaactgaactatcctgggacctcttgggctgagccttcttcacagagcagttctctagaaggcagagtccacatcctggtccctctggggcagggcctgtctggctgctggcatcaccctggcaggtggatggacagcatcatctcctggaaccaggtttgctgtgaccatgagagcctgaagatgtggctcattcggatccaggcctggactaatctggaaagagggactttctaggtgcaggtcaccagggatgcttgagaaactagagccagacttccttgtttgtttggataatatgtccctgtcctctgatagcagaggaaagagctctgctcccaaagaacattcatgtaagaggaggcatttttttcttctttgctttttttaaacaacctaaagtatgacctaagtgtatgaaactaactgatttctttgggtagagtagccctgaatttaactggggaaaaaatcccatcagactatgagtaaattgaccacccacattaagtcttatctcggtgacctggtaccaaagcccaggtgtcctccaggggagtattctggggtggcagggggattaggtgctagcgccagcagggaaggacacttgcaggtctgccttccaaggctaagcaggccggctgtctctccaggaactggctaggacaagtgtaaagccactgaccacacagaaccaggatgttctagaatctgatggggctgaagatgaagggagaaatggacaaggcacttctggctttattgaaaaggtgaagctcttggagtatattttagagtaggccagtaccttgtataagcagaaaaagacttctctatctccactccaagtcgtttttttctagttgattgggcctttttgattgataagaagaaaatgtgttttgtacgtgtaacaactttaagaatttccattggaaacaaagtatgatttgatttgatttgatttctaagttctcccttccttttcaaggttagcgatgtgctttatagcagacactagcacttttacatgaatacctggtgtgctttggatgtaacagggtcattttgggctcgaggtgagtgtgcaattagcagcaggtctgcttggtccagatatgcttgtttacaagtttagagcatcctatgccagaaagtgagatgaaaacaaaggcacctggattgctttgttttgcttttagataaaagagctttagctcacaccaggcagaagcataaccagtagccccagaaaccggtagcatgatgaagccctcagacagtatagtctgagccaccataagaggcattagggaaaactaacacctccttctttttgcaccgtggggtgctgaaattcctgctagagacttccccttacttccatgaatggcccaggggctgcttagtatatcattagaatgttcattctcctccttttccctggagtggaccagtgagaccaaatgcttgtgtttctctatgttttcagttcatttgttcaaatgacccagaagatgaatccatttctgggaaggctgagctcagatgaggattgctaggccagcctaggttctggggcggatctcagggacagaaacaggcttgtattaagtatgagtggcaggtacttctctagaacagccctaacctgcactagtgaggggggctcaggaattcccatgacattgatctagcagcctcctgcacgtagacactcagttcattttagggacgttcaatgcttgatcaaatggggggcattttctttctttctttttttccccagctacagtgtaattgcctacctgcctgggccccttctagaggaaggtgggctttccttgtccgtcaggctgcactcatgaggtgatatcgtaaagcagcagaaagactgagggtgcaaagaaaccacagctgccattcacggggcagctccctctagctcttctgcccagtgaccttacaggctttagaggagcctgatgagagctatcctgggggccaagggatgcattccctgcagcttcctcctgggggacccacaggtcagcccattccaggagaagcagtcttaggcccgtttgcatcccctgccactgccatgtgcctgccagcccggtttctgatgaagacgtggctcagtccctgctctccttgtcgcagtggcttgtacttcatgtgcagtagcccagggcccgccttctagagtgaatgtttccctcgagcccttggatatttttattctattttgaatggttccgatcaattaatgttgctttgtgtggggttcttcagagaaataatgcaaaccggccaggtgcggtggctcacacctgtaatcccaacactttgaggggctgaggcaggtggatcacctgaggtcaggagttcgagaacagcctggccaacgtggcgaaaccttgtctctactaaaaatacaaaaattagccaggggtggtggcaggcacctgtaatcccagctactcaggaggctgaggcaggagaatcactcgaacctgggaggcggaggttgcagtgagccgagatcacgccactgcactccagcctgggtaacagagcgagagtccttctcaaaacaaacaaaaaaagagctaatgcagacctcttctggttagacctgacacggaggaagtaattggctggtcaacttaatggcgccccacagcttcctctggatcctgcttctttgtacttggaacacagtttatttgagctagaggaaaggaaagttctagaattcctgtttcctcagcctgcactgtatcagatccaggatatgtctgcatttcatcaggatcaagtaagatacataaccttatatctgtaggagccagaaaaaaaaaaatctattcctgataggcatggaaacttagtccacatgaaagacagaagacatctaacagctgtctgtcttgggagcattaaaacccagacaccaagacacactagacagtccatctctgggttgtgatctctcagaaacatcttagtagttaatgcactgttcatttagggagtccccatcctggtccaggccaccctcctagaagctgggcggcagctggacgggcctgccttggtggcattcaagcaagcctaattggattaggttggtgcaaaagtgattgcggtttttgccattgcttttgatggcaaactaactttaagtcattaaaataagacccaacgcttataaaagagttcatatccacctcccaataacttctttagttccatgcagcctcaatcagttcctccattcaaaggaaccctctttaccctggccctgggggagccatattacacccacatcataatttttctgacactatgtgtgcttgtcaaatttcagggtcagtttccccttattggatgtcaggggtgttttgtgagttgtgttttaataggattctgttcgattttctataccagcctatattgttactatcatctgcctagtatgaatattttagtattcaaagcccaccagataaagctgtgttcagaagtggactttttggtcagccttgaaaaaaaaaaaatcagcatttctctgatatttcctgaggattaaccagaaactaaggtttctttttaggcagtggtaagaatgcgtattttcttcttccagaagttctggttttatacttttatcttttgaaagaataacattcctgtgcgactctgcttctcttcgcttttgcatttctcttttttaactcaaatctcttatttcctgccgttcctgtatctaaacagaatgggggcctcaggcagacaggaaccaaagaaagggtgtagtggctttgcagcgttgggtgagcagcagccgctgccattctgtgcactgtcaccggcgggggtggagggtctccctgtaggaggaggaaactcgctgttttcactggcagatttcaaggtgccggctccacctaccgcagctgctaggcattgctcttgtgtagatcgcagaaggagttattggtgatgtggggtgtaggggaagacaggaaaacggactcagagctaggaatgtgggcctggcagagaccgaaggctgggtgggaaggaagctcgcggcgagcctagggttcaagcctagcgcgccaggggtctccagtgagaccttgctcttccctgccgctgaggctggggctgcacggaggtcctcaggcttcccaccctttctgcatcagctttagtgtctgtcggctgggtggactgcagggcaggtgacctggaggaggccctgctccccagcaagcgttctaggagttacggtgtgctctattgggattggattacagtctctacttgtagactttgacttctggaattttaggtggaagggaatttttgttggtgggacgcagcagctcagtgcgtggtgtgtgcatgcgtgtttgtgcgtgcgtgtgcatgtatgtgtttgtgcgtgcacgtgtgcgtgtgtgtgcatgggtttgcgtgcatgcatgtgtgtgcgtgcgcgtgtttgtgtgtgcatgtgtgtgtgtctacgtgtgtgtgcacgcatgtgtgtgcgtgtatgtgtgcgtgtgtgcatgtttgtgagtgcatgtgtttgtgcgtgtgtgcgtatttgtgtgtgtgcgtgtgtgtgcgtgtgtatgtgcgtgtatgcatgtgcatgtttgtgtgtgcgtgcatatgtgtatgtgtgtgcgcgtgcgtgtgcgtgcatgtgtgcgcatgcgtgtgtacctacccacacctagggggatgcatggctctgtgccttggagagggaaacaggaaatacgttgctccacagtcctgtcatcctggtcaggactagtcgcgtggtttgcggacagagtgcaaaatgaaaatgcgaggccccttgttcaggtgatgaagcatttctagacagtgagaggagagcattaagccaagctcaggtcccttctgagtgcatagccccttgtggctgccaggcagcacacccaggaggccggccctgaccacactgttctctgctggttcccgaagctgatgggctctgtcttaggtcttcttactttgaaaggtctcccggcaggctgtggcaagctgcgcggatacacttttctaaacgtctgcatttatttcctaaaagcacaaatggcctggactagctagtgggtgtggaaccgagcccctagttcacagctgtaccccaaggctggagagggggttgccggtggtggcaggagctctgggctcccagttcaggatgggccacagggcgtcaagcagctgtgagcctttaccattgagctcactgcttggaaataaaacccttcctctgggccttgggcatccactgggagcttttctcccctttcctgggaggacagcaagccttttccaaccttctgccttcaaagagaagcagggtcatagaagtgctcagtgtcccttccccagtggctggacacttgctcctccagccttcaccccctggagagaaggggagtctgcggagccagtgcctccctgcccagctgggccacacgatctggtctgcgggtgtctgggaggaacctgcttcggagaggctgcgacctcccagctagactctccccttaggatcccatgtatggggatggtaggagagaaaagatccctctgtgtaagtagcctcaagttctagaagaccatggccccgggaggcagctgaccatgaagctgggcttcctgttgttgctttctttcacgagcttttacttttcctgggctggacgctccaaaatgtttgcagttccatttgctttttgcaagtaggtccccatctccatatacattgagcaataatcctcactatgtttcctgattctgtctgggattatatttgctaagtaaaaatgttgacagaaattgcaaactcatctcacctggatttgattgagtcaccttgaatgacataacaaattatggctttgttttcatgcgtcatgcaatcttccggactacgggaagttctgcaagtgttctccaggggcatttcattaatagcgtgtcagcattagttttaatgaatgaacatttgaggtacattctataaatcaatatccttaaaatgtcatctgctaaacattcactgtgacagaaagtagatattttagcaagatctatgttaatgctacttaattttagacatgcatttaaagcctacatggccaatagcccaagtatctttgaactgtgaaatcaacctcagatctcatctgctgtagccccgcaagccggagtctgtgccctccatgacccttcttatcccttggtggccctgcatagataggggagttggcccctgcccaccccgtgttgtattgccttagctccatcagctttgtaccctcacacgtataggtggtgaacttatgtgtaaatacatgtgtacagatgagaaactgcaacaaaaatgtcctgtggatgataatcagctcagtttccggttttctacattctgtgctgtttccagctaagaaaaaggcgaactcccactatataaagggaaaaggttgtattcatttcatgttcctcatgaaatctctgctgtatgtttatggaatggccatgactaaatgtatatatggtatgtaagaggccatgctgttaaatgttgcataaactaacacagattctgtagtcaaaaatatttaacttgttattgtaaaatgtgatttgtcattgagagattatttttctgtatgtatatgagagtattttaggaatctaatttaagtgcataaaactatagaaaaaaatttaaaacctattccaagagtagaaaatgcttaatgagattacttgggttcaactcaactaaatttcttatattaaaaaaaaattccaagttgtatatgttagaaatcaaatgagtcattttttttcctgcaggaaatatgataaatttcagtgtaatggatggtggcgtgatcaaatgaaaagtatcctgtagctatgacctcgcatgggaccttggtgttgcattaaaaatggatttttgcagatcacatatctgagagggtacttgtgtcaggaaggatgagaggatagggagcctgtttttcatcagatccatgtgccacgcaggcttccttgggttctagtggatttgttagggatctggggctgacgcagctatcccactagagaggccactctctgacttccaggtcgccctttctacttctgtatctggattgattcagtttatccctaattagcgtttgcgttttccatgaaatttcctgatgcatcctcactgtcttcaactgttgcatagccaggtgggtggatggatggtttagggtttctgagttaagccgttttggggcaggcttctggatgcccatgtttccatggagaccccagggggaagatgccttcctcccgtctgcattcccagaaaaggatcagaagtccaggctgcttctggggcacagactttctgtacttggccaccagaagtgccccttaggccacctaaggaggattctgtgaaactcaatgtctaaacccctgagaaaggcattcagaaatgatttcaggagggggcaaccccaggagtccagcctcccctggcagcctggaaatactgcagtaacaaaaagagctggtttctggtgatctgaatgcattgtgtttgggggtgacaccgctggtggaaggttgagggcctgtggtctgaaaagacatctgaagaatgtgttaggttttcaacatttctttgaacaggctgcgtgcatcttaatgctgtcaaccagcaactggagccccttttttgagaggcccgaaccagtaaagctgctgacttcaggagtatgggaagctgtgatttctggaagcttcctggaatctatttaggtgcatgaataatctgcaaatcacttagaggcactgtccatgtggtccataactggctttattcccaaagatggagctgttcagagatttctttgttcaggcgcagccttggaaggccacctaaggcctgccagcagaggagatgagctctggtctaccaaccccaaacaggccctgactctccttccttagaacgatgccctctggctggggtggcaagagggctgtgagtggaaacaagtcagccagtcaactgtcccttgggccttggttgtttcaaaaaagtctggggacaagaaaagctagaacatggggccctcccttcccaggagtgctagcgaaccctcccagatagcctttgcctgtttggaaaagaatgtaatccatcagaacgtgagctccttgtgcttccagtgacaagcgggccacagtgctggtggcatgttgcttccctcacagccctgcccaggggtaggaccaggcccgccccttgatggatgtgctgttgattgtaatatacttctgttgccaaataatggtactgtttaattttccataaaagagagactatattgtctgatatgtaatgttaatggaattctaagaattactagacactattataaattgtagacttacgtatttgtctaaaggtttgatgaagcagggccaaaacattgtttcttcttttttgtttgaaagaagctgaggtttgtttttgctgtttgagtgttcctttggcaacttattatgtgtgaaatgttaaattttaccgattaagatgatggtaactgagacctttctttaaaccagtagcaacatcagtacaaattgctcttcctgtgtatcttgaacctaaaaagaacaatctcttcaaaaacaaaaacaaaaacaaaaaacaactctttggtcattttgacctgtgtggtttaaattcaaatagttcatgaataaaaggagaaaagccaatctgttatagtggattattttgggttctttctgcttcactcttttctgagagcacaggaagctaacagccctgcaaatggtgtctcttcctcttcccacagataagattgtagctgtgcaaggaaaattgtgcagaaataaacctagaaaacaaaaccaaccaacaaccctttcagctgtcctgcggcttcagataaatgttagctaacaccaagcagaaatagatttctgtgtacgaagtctttgtgagaacaggagaagttttgtgttgtacagcataagaaattctgagggtggggttgagagggcggtgcaaaaagctgattttcttataaagacattcagaagggtcgctgaatttccaggaagaagtttctaacacacgtaactccacgtgttcagcacttgggtgatctataattctgcgttccataaaacccaacgctgaattgtattaggttgtttcctcctgttctggttttaaggccattcctacctatttcatcactgatttaactgactataaataagtcctttaaattctctagctggcttggacactagttgaattgtgacatagcacatttttaaaaagttgaccctacagcagtatgtctttgcctttttaaaactagtatgccccatttttgaagaacataaaatcgtatgcccttttcttggttgttatttgaagttttaaaaataagttaaggctggatgtggtggctcacacctgtaatcccagtgctttgggaggctgaggcaggaggattgcttgcatccagaagttcaagaccagcctgagcaacatagtgagaccttgtctttacaaaaaataaatcagccaggcatggtggcacatgctcatggtcccgggtatttgggaggctgaggcaggaggatctcttgagtccaggaggccaaggctgcagtgagccatgattgtgccactgcactccagtctgggtgacagagtgagaccctgtcttaaaaataaaaagttaaatgccattaaaaacaaatgcaataattaactttcccaactatacctagttctctccaagtctgatgagggccccctcacacagaccagagagtggatggaatcactagtacaaaacatgtaattattacctatttaaccacggttagtagccagcataatcaaggcaatactttttattctcaaatatttagtttttcttcttgttacagaagtaatacttgttaatgcagaaaattcagcaaggaaagaaaaacacaaaggaaataaaatcacttaatggagatgttcttctacacaaaaataaaggttttgatgcacttcatttctgtattttttgtgtgtgtgtgcattttaaatactcttgtactatttatttatttatgagacggagtcttgctcttgtcaccctggctgcgctcggcctcttgtactatttaatagctaatatgcatcgaaaatatcccatatacaagggactgtaaaactttcaccttgattttaaaaaaatactgtgaagaaaatcattgtaggctgggtgtggtggctcaagcctataatcccagcactttgggaggctgaggccagtgatcacttgagcccaggagtttaaagccagcctgagcatcatggcaagatcctgtctctactataaatatgaaaactagctgggtgtggtcgcactgcctctagtttcactgcctgtagtttcagctgaggtgggaggatggtttgagcccaggaggttgaggttgcagtgagccatggtcgtgccactgcactccagcctgagtgatggcgtgagactgtctcaaaaaacaaaacaaatcattgtacatagatctctaggttctctctggtgacctcgtaaggcgacatatgaagggcctcatcattccccaagattgtatgtgcttgatcaacaggaagcttgctgagtttgactctgaaggatctgggcagcatcagcagcatgaggctcccgcaaagacggtttgtccattggcagtcacatgtctgtaggagctgtgattgtgtgtatgacgccaccttctgcagagcaggcctcactgcaggcaggaggcaggcagtgagtctgggggaacctggaatgtggtcatggttaggttgcagactcagctgcggagacagaactcaatatcccgtggctttgaagagaggtctatttcttcatcgtgtttaacagcccaggggcagcagtaaggcttggcagggtggctctgcccttggcatcgcttgccatcttgtctgcatctagctagagggatggactaaggattgctcaagagggcagtccaggaaggcacacctcgcttcctctcctttcccatttgccagaactcagcaccaaggtcaggtgctgccagaggctcaagaatgtggtctctagctgagtagccctaggcccacctaaaaggtggctgaatggtcttcgggccagccagcagcctcagcactcctggttcctggaaaggttgaggggcctcagcactcctggttcctggaaaggttgaggggcctcagcactcctggttcctggaaaggctgaggggccacgtggtgtctccgttggttgtcacattaggtgatcatgtattaaaagctttgccaggaggaagctggagttgaagccaagcatgagtgtcaggagtgttgtgccacatggagggcacgccagtcccagcactagcacatagggagcagcgctgggccatgtcattgctctgtaggacttctttgctgcaatggtcctgcctctgcccaaccaggggtggttctgggaagggaactggtttgttggccaaaagttcttggaggttgactaaggaacaggcacctgagcgggctgttgcgtggggaactctgtaactattttctctagaagaccaaaaggtaaaatgtagtggaagagctgacctgggaactggttttggttaaaaggtgaattgggagcatcttagggacaaagcgggaaggggcaggggacctacctaaggtaacttttgcccgtttgctccagcaacgtgtcggcgcatggtgttagttatacagtggtaaaaacatgggctgtagggcctgacaccagctgtccagacaggtgactctgagcacatctctagggcccctcaatctctttcctcatttgtaaagtggggtgatgtctctcccacccgtgtgacaaggctgtcatgcagcttcagatgtacatgaaatggccttgaaagctacagagcagcctacaactaggtgtgttcatgttaggatcaagggcaagaggcctccctggagggctatggatcaaacacagatccgatgatctagtagggaccaggaactctgaacaaacccttaaagacacgggattttggcaggcaggaccagatagactttgctgagtgaccatgtgttaggtgctgtgtctaaccaattaattcctaaacataatctactcaaaccaaattctctaggccaaaagggctttttggcctttatactcaggggataccaaaaaaggacataaaaataaagccttctacattccagtttaaaagacagtgaacataatatgatctgttctggaagctttttattgttgctccaagtttaagaattttcactgatggcagaaaaccaacacttttagacaatctcccgcatagccctgcccagcttctgaatcttggtcttgacagacatgtcaacatatttctcgccaatgcgcacaatcattccacccaagattgacggatcagtctacaaaagaagtaagactggaaatgtgaaaacgcgctaatcaaatgggacacacaaaaaagtgttttgaaaggctaaatgtgttgcacaaatgtaagaggttataattacacctagaaaaaggcaaaagtaaaactgcacagtcagataatcatttaaatttaaaataaatacaaaattttaactacagaaaaattagtatagagttagatctaatatttcactagtactttctgtagccattttaagcttaaaataacccgagaaaacgtaccataaataatttaaaacctaccttagcctccaatttcaatacttggccttgacttaggaagctcttgaggacagtttttaattcagagagtgtggcttcttctaaaggctgaaaggcaaaaccatcctttcaatttagataaagcaaaacagaaacttccagagttaaaataccccaggcccacatcaccaagacaggccttgtgagctcctccctttgctacctgggcccatcatggagctgctctgcagcattcactccttgttcacgctggaggttcagggagcacaggaaggccctgcctcacagcatcacccgggcagctcccactcagccgttcaaggacggcctgtaaatgccactccctccctgcctctgctctgtgtgctagcagtacaacttggaactaacaaggaaaggccttcaagtttctaatgcctgaagatgcagccccatcaatgcaggaggacacaggcctctcctgggtgcagccctggggacacgacatgcatctatcatgtccttggctgaaaagttgccattttaacctggttttacatcttcatgtttgcctagctctgctggctgttcatctccccgcatccacagctacctggagctctggcaggccactccactctctgaaccccagtgagagaacctggagcagttggcttttcctgaagtcagctcagctccataacctactttagagcaagcacctcaaatgtccagactgcactctcctctcggccccaactcttactcctggttagttatgttatagtgttaagtgttctaatggtgaaaatgaagaaggctgttaaaccaaaggccttttttttgagaccgagtctcgctctgtcacccaggctggagtagagtggcgagatctcggcttactgtagcctccgcctcccaggttcaagtgattctcctgcctcagcttcccaagtagctggaattacaggcgcatgccatcacacccggctaatttttgtatttttagtagagacggggtttcaccatgctggtcagactggtctcgaactcctggccttgagtgatccacccgctgcagtctcccaaaatgctggggttacaagtgtgagccaccacaccctgctaaaaaggcctttttttaacttgtcataaatcctacctccctggcccctcctctaagagcctaaaaaaatttggcagaaaaatttatgtctttgtaaagatataacaatatcctttttttgggggtggggggtgctggtggtggccagaatctattcgtgttcaaaacatgatttactgagactaaaaggttacagaattctgaaatatacataccctccactgagacatgtaccaactgccaggtacctgtctatgccaggcacatttcatgcctactatctcccttcatgtgggcaaccctgaaaggccaccggtcattatgcccattttacatatgagggaacggaggctcagggtgggtaagaaactcacctaaggccacatcagcaggtgaggaccagccccaatatttgaaaccagtctgtgtatttctaaagcctgtgctcttagtcactcatcaagacataacgtttttcaaacagtacagactcacgcacccaacagtatcaacatcaaaagcattagtaacagttggttctaaaatcttttgcaaaaacaagcatcctttaaaagaaaatcatggccttgtggctgtgcacggtggctcacacctgtggtcccagcacattgggaggccaaggtgggtggattggctgaagtcaggagttcgagaccagcctggccaacatggtgaaactccatctctactaaaaatacactaaattagccgggtgtggtggcaggtgctgtagtccagctacttgggaggctgaggcaggagaattgcttgaacctgggaggcggaagttgcagtgagctaagatcgtgccactgcactccagcctgggtgacagagtgagactcagtctcaaaaaagaaaaaaaaaaaaaaaaaaaagaaaatcatgtccttgtgttcactgaagaatggcctgcaccagtgcttcatgatgggtgaccgtggggcaggtgaatgtctaatctgtgccacactgttagggataactgatgcagccacagagggctccctgcctatgtctgagctgtaatgatttgcagccaggcacatgttttgggggcaccaactactgaactacaaacgtgcaagtaagtatgatgtgctaggatgcctctccttgaatctgtgctaactagaaggttagactgtcctttaaatgctacatctattaatctagatgaggtcaggtgctacgaattccaagtcaatctaccacactcccctgttttcctgtagggtaagctacactacatttgactgagttacatagggaagaaaatacatattgaagacaacaacaaaattaattctagggaggcaatgtagtgtagtctaaggaaaatggacttctaagaggccttgaggcctgtgttcaaattctagtcccacctcgtatgactttgggcaagcgacttcatctccctgcattcggtttcctcatctgtaaaatgaggttaattatacttctatctcacatgaatcttttgatactgaataacataataaagcacccagcatatagtagggttcaataaacggtagccaattatagcccactatcaagtcaaaaagatacaaaggcccaacggctctactccttcccactcaccaccaccaaagatgaaaggttagtaactctagtttcaggccaggtgtggtagcttacacctttattcccagcactttaggaggccaaggcaggtgggtcacttgagcccagaagttcgagacaagcctggagaacacagtaaaacctccatcactataaaaaacacacaaaaattagccgggtgtggtgggggtgcactgtaatcccagctactcaggaagctgaggcaggaggatcacctgagcccaggaggttgaggctacagaggtgtgactgtgtcactgcactctagcctgggtgacaaagtgagactctgtctcaaaaaaataaactctagaattctagtttcaggaaactacttcaagtggtattcataaaataattcaaacatataatagagtctaaaccactcttttccaacacattttgatgtactttacatttaacccaggccttatgaataatcactggttacagaagcactaataagatacacgctggcttttccaaagcaaagggtcacagaagctgatataaaaatgaaacaaacatcccaggtgacaagttacctttcccaatttcttgattttaccctgtttttcccttttcttcctgcaaaaggtgacacatgtaatatcaaggcaaacacagcagcaacaacccgttacttacagatgcagaggtcactgtgcaaggtacctctccgcgatggacactcatcatggtagaaaaggcagaaacgactccttgggtattgcttaatcgaccattttcagcaagcaaatctgccagagtgaaggtgtctcagtaacaagaaactcacctgaacaagttattcatgaagttgtatactcaacccaaaaaacaaacttagatttgtggccttaaaacaccatatacaggggcgcatgcctataatcccaactactggaggctgaggtgcaaagattgcttggggccatgagttcaagaccagccaaaatagtgagatcccatctctacaaaaaaacgttagggcttggtggtgcatgtctatagtcccagctactcaggaggctgaggcaggaagattgcttgagcctaggagtttaaggctgcagtgtgctatgactgtcctactgcaccccagcctgggcgacagagcaagatcttgtctcttaaaatcacagtatattcaatgttctttaacaatgtgaatggaggccaagtgcagtggctcatgcctgtaatcccagcactttggatggccgagatgggcagacagcttgcgtccaggagtaacatgggtgaaaccctgggtaacatggtgaaaccctgcctcacaaaaaaaaaactaaaaaattagctgggcactcaaaaattagtggcgcatgcgcgcagttccagctactcaggaggctgaggcagaaggatcacttaagcccaggaggcagaggttgcagtgagctgagactgtgccactgcactccagcttgggtgacagaaagggacacccaggctcaaaaaaaaaaaaaaaaaaaaagaatggagaagatacaacttgttatttaaaacgcatatccaatttttttttttttaaatagactgcactgacaaggatttaaattagtaggtatggggggttctcagcttgcaatctgattttcatatttatgttacagattgtatgtttggctacaaattcaaagatgatatcatgaacacactttctctgcaacttttattttgagctggctatgaggatctgaaaagcaatccaggctgcatggtggctcatgcctgtaaccccaacactttgggaagccaaagcaggcagatggcttgagcccaggagttcaagaccaggctgggcaacatggagaaaccccatctctacaaaaaatacaaaaaattagctgggtgtggtggcatgcacctgtattcccagctactagggaggctgaggtgggaggatcacctgagtctgggaggttgaggctgcagtgagctgagatcgtgccactgcactccagcctgagtgacagagtaagactctgtctcaaaaagagaaaagcagtccaaatgtacccaagaatgcaaatgtatccaaggatcaaggtatagccacaggccacgaaccattttcttggtaggtatcacactggccgcctccacagttgaaactactgactatacaattagacatgcttaggtcctagtatcctttagacgatgctcctcacacttcaatgtgcaaacgattcacttagggagctggttaagatacagactctgattcagcaggttgctgtgaggcctgagattcttcactgccaacaggctcccaggtgatgctgatgccgcccacagtccatggaccacatttccagtcatagtttcaagacacctcaaatgaaaaagttctaatactcactgatcagattggtagtgaggggagagaacctctcttttgctgtgatgtcatttaggcttttcactttaatggaacgcttcacatagggattcaaaacagaagcagccactttgggttccttcaggatttgctgaaagcatcaaaaaataatttcttaaattttttagagcacaaatgaaggatgtgccatgcacacactttctttctttcttttttggagacaacgtcttgctccgtcgctcaggctggagtgcagtggcgcaatcttggctcacacaacctccacatcccgggttcaagcgattatcctgcctcagcctcccgaatagctgcaccaccatgtcccgctaatttttgtatttttagtagaaacggggtttcgccatgttgaccaggctggtcttaaactcctgacctcgagtgatccacccacctcggcctcccaaagtgctgcgattacaggcatgagccactgtgcccggccatacaaacactttcttatgaattaaatattttatgaattaaattagcactgccgaagaacatatgaaaaaaagattataatcaaacaattttctgactgcctttcagaatacactgtgcactgcaccaggattttatatagaatgatgttcctcaaaaaaatttaaaaatactgtacgaactttcttaaatttgtttttgcttttcaagaaagattataaaacactaaacagccaaaccttcattagactgcatactttaatatatttaagagaggagtcgtctggttttctagcagtgctatttctagagtgcagacctcacaactgtgctctgaccacagaggcctccgcaccgctcccttggaggggccctgcctcttacagagtccagggaacccagcagattctgtgaggcctctggtgctgccagagcggccccaaagagtctgggagacagagtggacaataaaacaggagcacaaccatcatgggaaacaacgttcttctcattttgttgtatcacagtgtctgaattcagtgaccaagtgcagcttccagcatgttgctccagagttccaacaaacgaacagcagtttccagttgagcaccttcagttaacacacctctctatgcttttcaattacgctcctagcacctcctcccaggctcctggccagaatcctgcctctgatccaggatactggtcagatactatcatccaatgctaacatttccacttgagtgaccccacagaaatgacatttttccataaaaaatgcaggaatatacagatttaaagcattctggaatttgggttacctagtttttcatgtttatctgtgtctcctgcatcatccagaggacagtgcgtatccttgtatcatccttccctcttagtgccaaaaccctgctaatattcagtgtcttaaggtaattgcctccctttttctccatgtctcgactgacttccaggctttagacaaactctattctaatatccacaatccaagtaattctctccattgtaaacatgattgtttccgtttaaaatgggcataactgacaagtagcagacaataaccatcacctccaaaaatgcctgtgtgagaccccgtctgttcctgcatgcccttcccccaaatgtctccaacaacagggctgggctcctgggctctgagagaatcataagagtttatcacaccagctaagaccttaagcattatctgcagagataaatggatcaaggaaggaatatggagctaaaattattctgcctgttaagacggaagttccaatagaagctcaagtgaaaaatgaataaaacataaacagtacagaacagtaatacttatagactatacatacgatgattaatatagaacgtaagtattattactctatacaactggcctatgaattgttttttctaaacaataaaaacttgcagatatgtgaattaaagaatgaagaatcttaaaatgaagaaaaaaccaaacttcctctgaagaggctatataccagactgcgtctccctcaccttttttaatgcagaccttactgccagtggtggcgctagaaaatcgaaggaagcaacagaatgtgtagaaacttgttaactagaaaattcggtgaaaacgaaagcagacattctcctattcagttacaatgtaggcttctggtaatacggtttatttattctgcttttcatgtttaaaaaaaaaagtaaaaaacatcttgcagcagcctcacagtctttgcctgtcagtcctctactactactgggaagcccatgcccctttactaactctgctgcccagcgcgccccaccctgttattcttccctcacattttgggaacaaaataattaagaggtttaccaaaacaatgaaaaggtctacatggttacttctggggttctggcaattgcaaaggcatctctaccaaatgaaaacaacctgtaagacatatctgagcctcctctgattctacaagcatagaatatggcaattaaaacctgaggaaaaggtttcatgaaaacaaattctcagtaaaaccaaatcacaatatattctaaacacctagcccataagcataggttttttttttttttttttttttttgagacggagtctcgtaccgtccggggctggagtgcaatggcgcgatctcggctcactgcaacctcggcttcccaggttcaagcaattctgcctcagcctccggagtagctgggattacaggtgttcactaccacgtcccgctaattttttgtattttttagtagagatggggtttcactatgtcagctaggctggtcttgaactcatgacctcctgatctgcctgcctcagcctcccaaagtactgggattacaggcgtgagcactgtgcccagttataagcatagatttttaaaggtagcttttaaattctcttctgaaatagcaattttcctaaattaccatccattttaatcttatatttctaccttttcttagcccctaatcttggttcctaatattaatatccttatatgtatctgtttgttctttttatatgtcttataataaaaacccaatattattactaaaaatgtgtttacagacaatggctttttcccagttttttcttgtaggatacacctcattaggaatgcacaaacaaccaaaggaaaaaatatacaaacaggaacttcatatgtaatgaataggaaagctacttactgctactctcaacaactccttttctacttgctccagcttattctgttttgatgcagcagaataaagagctgtggcatagcgaccttcaataccgtatacctgaacaggaggctttaaaaaaaaggtgaaataggagaggaaagaaaaaggaaaatcagttaatagtatactctcaagagcagaatttaaaatttatattttaaaaaatgtatctctttaacacaaaacagtttaaatatgtcattcaagagctgtcctaaatggcaatttgcaaataaattagcgatgtttccttggtcaggtcactcaatctttgagcctccaattcctcatctgtaaaatgaggggcttagtaggcattgtctaaagtcccttccaggtttacatacctttatcaattacttgtactttaattttgagataagcttatgtttcctttgaactcagtaactatttagtttcaagtatgggaggttgtgaacactgatagacagtttcgagtatgttagagctaggaaaacaggtgtttatgaaacacacaagtatacttttatacatttcatactaacactacacattttcccttacatagcctccctatcgatgttcagtgtaacagagccctttggcagtttacaaaaaaacctgatgcttgaattatttttcacaataaactatagactttttttctaccatcaatgtatgactacatgttcttagtggtgctgtatggttgtagtgggaaagctcaggcttggatgagaaagatttagttccagtccagctctaggactaagctgagtaacctcaggtaaattttcccagggcctcagtttccccttttgtaaaatgggaagaccagttactccttaacactgttatgaagttttaaggtctcacatgaaggacgaaatgattttgatcatttgatttgagatttagggctggtaatgaggacgggacaggataattatcttcctaaattccacctgacgtgggctcattaaggacacagacctggtatgatcatctttcctttacacgatttttccaaggggcggactggctcactgttgatttggtggggaaaagcgtgggtagtatagtctgcccagcacatcttagaaaagttcctgctccttgacagttgaaccaattctctatcacacaggaactttctttaatcaaataaagaatttcaaaataacccatagaaatggaatcagacttcatgttccaacagggttgtttccagctgttagccatgtatcatttcagggggccttctggggaacttcatttattatgtgtcactaatagtcctctttatccggggtcaactggattacttctggtttgaaaagaaagggactggcaactccctgaaatagtgagcctccttggtgcctactggaaagaaagggtgtgaagagtatgaatatttctcaccagaatggaacatggagaactgcattagaaacccaggtaccttgatattttttttttttcgagacagagtcttggtctattgcccaggctggagtgcagtggcatgatctctgctcactacaacctccgcctcccgggctcaagcaattctcctacctcagcctcccgagtggctgggattataggcatgcgccactatgcctggctaatctttgtatgcttagtagagatggggtttcatcatgtcggccaggctggtctcaaactcctgacctcgtgatctgcccacctcggcctcccaaagtgctgggactacaggcgtgagccaccgcgcccagcccggtaccttgattttaatatcgtctcctgtaataacttcctgtgataacttgggcatgtcactttgttaaacctgtttctttcattaaaaaaaaaaagtaagtaaatgctagcttgcctattttagagggttaatggaaaaacaaatgattaaaaagttttcatatttaaagattatgcatgggcctgtcaaaaagcaaatactcaacaccattcctttccccaccctatgcacacagcacattttgggaaccacaagtcacgcaaaaaggtttagatagtaactacacaaaaatccacgccctgactgtactgctgtttgactcacactttcgcgtactttatcattacagaagaatataaattaacataccctcacaagcttggcaaatggtctgaccacagaggtactgaagcatcgcaccttcaaagcaataaaggaaaatagatcaaacaaaattacttgaaggatttctgcatttaactcaataacaacaaaaaattttaaataaccttaaaatcattacttttgtctctttgtatattcacatattacatgagggtgagctacttactattactaaggggtaaacttacccaatgaggattatgccaagttgcttgggaaatcaccttcccacgaacctcctagtttgctaggaatggaccgaggctagcatacccgtaagacagaaaaacactaacttccaaggagtgcatgtttcaaaaatatttaaccaaaattttggcgtttctattaacagacccttgagcagatcatttgcaacagacgtaccctcctcggaatgcaaatgctatctgaaaataaagatgaattttttgagtactgccgcagagtttgatctgacaagaagccttagttctgagagacactatcctgcccatcaaaagacagagctggaatacacagtttaaaaatcacctgcaagcgcacaggtcacagatcacaggtcaccttcaaatactccagctatggaacgtgttttatcaaaactgcttgtgaggattaagactttttaatgcttatgaaaaaattacctaagatgccaggaaggggtcatgatatgtaaagcaccatggtgagatgcagcacaaacagcataacattttttcaaactcgatcttctgggtgattccgtgggttcaaatctcaattctaccacttactgactgagcagccaaagactcatttaaacttttcggcctcattttatttataaaactgtgaaatgtgttttacaaatattccttagcattactagtaagtgatctctgacaggttttaccacaatggcaaaggaagctgatttgggggctagtccatgccccttccccggaattcagcgaagggcagaccccctctcctgcgcccctcaggctagcagcttccaggggctgtgctcggaagacgccaaggttacggcacgcgcagccccgcgcctactgccccgtaggcatcccgggggacaaacgctgggtcgtcctgagtcgctcccactcgccaggtcccataaccttgaagactgccagacttccccagccgaagcatcgcaccctggtgctcgaggtttggtaccggtcatcccaggagggatcctcccactggctctcaggaccacctttctctcacctgccgggagagcccggacactgctggggcagccatcttctcccgggcggctgtaggtcaaacccgagtgggaagagagaaacgcgcaagggcgcacgcgcgcgttggcgtaaccgctaggttctctgggaagtgtaggcgtagggcgtcaggccgcaggcgcagagacctccctcgggctgggagttgtagttcttagcagtggtaagggctggaccctcggggtggagccacagggcttcgactgcatctgaaaatgaagtcattgttactggccaagcggcgctcactgtagaatggatttgctgtccccagttttaaaatttacatttagataaatatggtggcatttgttccatttcacagttattaccagcgtcactggcttctttacacttccttcccagcatgctaaagcctgcatcaatggctttttctcacgttgcatacaaagacaaaaccaaaacaaaacaaaaagcccccaggagccttgcagctccaggagcggacaccacgtctctcttacctgggccatgactacccattgttaaataaagaattattcagtgatgcttattaaagcatgataaggaagactttattcaggaccatagcgatgggtataggaccagtgcaacagggtctgggagtgggcagagagattgggctcaactccgaaagcagaatgggcaaatgggaatttatggccaaggagcagtgcgggggtcagtggatagaaaattacttagaggaaactggggtaagagggattctggctaaaatgacctagaggaatcttgtagaagacaggccagggtgatcagacatcacctgggggatggtgaaggatgaagaccctgatcagatatcaaagatgatcggttgtcgaagattgggggttctggctaaactgacttagcagttttgctaaaactggactttacaaggaggtgcatagataggactacgagaaggttcagaagtctcactaaagtttggccaagcaaaagcaaagaatccctgtggccctccattcccctcccctctcccccatctcacctgagtatagaactgagctgttggtttgtgagggcatatgggattctggtacctagattcttgattctggctagggcagagtggctatctgagcatcaggcctaaaataggagaacccgggtttgagcaaatttgatattgaaactgagaactgggtactagccttggatatagtttgtctgcatccataaaaacaacctatcttcaacccattctctctaaatagaacttggtcgaattttctcctctgtcagagaagagactggctggcagagcaagggtcagtattcctggttgtaatagtgggggttctgtaatcaacttaaaagaaaaattctctgctcagatttattatagaaacacgttaattcactattttgcccttttagagagcagttttctcattattacaatttttattttttgagacagagtctcgctttgtcacccaggctggagtgcagtggcgtgatctcagctcactacaacctctgcctcctgagttcaagcggttctcctgcctcagcctcccgagtagctgggactgcaggtgtacacaaccacacccggctaatttttctctttttagtagagatggggttttgccatgttggccaggctggtcttgaactcctgacctcaagcgatccgcctgcctcagcctcccaaagcttagaggtgtgagccaccacacccaaccccctaaaaactttttaaaacgtagagaaagataaagaaagtaattgtcctcttttcttccactcggaggcaattgttgtaaatattttggtgtcttgtttctcaatatttgtttaggctgtggcctgaactaccctggcctgaatcccaatcagttccttggcccaattatataacttctctgtgcttcagtttattatctataaaatgggtattataatagtatctgcctataggtcattagaagaaacaaaaaggtatacatgtaaagtgcttagaacaattgcctgagagagtggtgcttattaatttagtcttttttttttttttttgagacaatgccttgctctgtcaccaggctggagtgcagttgtgtgatcacgactcactgcaaccttgacctcctaggctcaagcaatccttccaccttagcctccccagtagctgggcctacagacacatgctaccaagcctggctaatacaacatttttttttattttagagatgagggtctcactatgttgctcagacttgtctccaactcctgggctcaagcagtcttcccacctcagcttcccaagtagctgggactacaagtgcacgccaccacacccggttatgttagctctttattttgtttgcttttattatacatgcagattaacaatctttatacagtttggtattttgccattttctttaatgcaagaaagaaaaggatgcaaaattacatatgagttatgcattcatgcttataatataagcatatttccaaattataaaagtttctaagtatcattttaatggctgcagggtagtccatcaagtgaatattctgcaacttaattattctatgatttttgaacataattcagatgatttccttttttctttttgctattttaaacaatactgaatcttctaagcatatttagacatatatttctcttctttctttttttttttttttgagatggagtttcgctcttgttgttcaagcgactctcctgcctcagcctcccaagtagctgggattacaagcatgtgacaccattcccagataatttttttgtatttttagtagagacagggtttcaccatattggccaggttggtcttgaactcctgacctcaggtgatccacccgccttggcctcccaaagtgctgagattacaggcatgagccactgtgcccagccttctttttttttttttaaaaaaaaaagaaatggtgttggctcttttgccctggagtacagtggctattcacaggcatgattcccactaatgatcagcatgggagttttattttatttttatatttatttatttatttattttttgggatggagtctcgctctgtctttgaggctggagtgcagtggcccaatcttgactcactgcaacctctgcctcctggtttcaagctattctcctatctcagcctctagagtagctgggattacaggtgcatgccaccacacccagctagtttttgtatttttagtagagatggggtttcgccatattggccaggctggtcttgaactcctgacctcaggtgatctgcccaccttggcctcccaaagtgctgggattacaggcatgagctaccatgcccggcctaaaaatggtagtttggacctactctgtttctgacttggctggttcacctctccttaggcaaccttgtggtcccctgctcctgggaggtcaccatattgatgcttaatttagtgtggacacctgaccggcatggtgcactacagctgagagctcctggactaaagcaatccttctacctcagcctcccaagtagttgggactacaggtgcacaccaccatgcccagtcatttttttttttcatatttaggaaaatttccgaatagatttccagaatttacacaacttggtgagagaatatgagtactctaagagcctctgatgcatgaggccaagctgcttttcaaaattttaaccaatttatactttccgtagcagcacatgaaaacccttgtttcactctactctgcaaactttcagagactattttcaaataagcctaatgaaaagtattcaacacattatttaacacaatttattgagcagctattacatgtagccagctgttctattcactgaggctacaacaggatacaagacacagtgcctacctttataaactttatattctatgagaaattaaactgcaaaacctgtgttttctgaagtgtgggtgttaacagatgtaatacaaataaaaagttctagggtcaactatacttgggaaactctagactctgaatataattcagatggtttctgctttttgtttttttttttgccattttattttatttatttgcttattttttgagatagggcctcactctgttgcccaggctaaagtgcagtggcacagtcatggctgagtacagcctcagcctcccaggctcaagcaatcctcccacctcagcctcctgagtagctgggactacatgtgcacacagccacacccagctaattttgtattttgtagacacaggtttttgccatgttgcccaagctggtctcgaactcctgagctcaagcgatcctcctgccttggcctcccaaagtgctgggattataggtgtgagccaccttgcttggcaccaccaacccccactttttttttttttgccattttaaacaattctgaatcttctaagcatctttttttatatctagaaaaattttgaaatagatttccaaaactgacacaacttggtgagagaaaattgaaaagctgcatggaaaattaattataaggagaaaaaaggaaaaaaaattaattataagtaaactgtaaggttgcacagcagcagagaaataccctctgtttattttgtatttacccaaggatgatctcaaactcctggcttccagatccacccacctcggcctctcaaagtgctgagattacaggtgtgagccgccgcgcttggtgccctgcccccaactttttgacattttaaacaattctgaatcttctaaacatattaagacacactttctttcatatctagaataatttccagccacttgcacatctccaaaatagtggtttatggtcatttcaattttaggatttgttaactggttgcacatatatggtttcatttttattttgagttttaggatgactcgagatgtagatgggcttggtattcccccattttatagatggtgaaaacgttttggatcctgcttacgcagcttgtctaggaaatggcaatttgcatctcaaacccaggcacctgcaccaagtcccatctctttccatctctatggttgaaagaataagtgaatcattcaggatgtgtttctggaatgggattttgaagctagcctgtattttagtggtgtgggcaaagggagaaacacagaagccctgaagcctgataacactgcatccacacctccctcctgcctgctcttggatttctgggtgcctgtaggcaaatcactgtgatgtcaggccagggcgccatgtgcaaactcccatgtggagggaactggcagaaacttcccagctgtgacactgccacaccctctgctatgcaagaacagagcatttggaaaggaacaaaaagttgtatcctataagggaagaggccgggcgctgtggctcacacctgcaatctaagtactttgggaggctgaggtgggcagatgggcttgaactcaggagttcaagaccagcctcggcaacatggtgaaacaatgtatctacaaaaaaaaaaaaaaaaaaaattagctgggcgtatggtcccagctacttgggaggctgaggtgggagaatcacttgaaccctgaggggcagaggttgcagtaagccaagatcgcaccactgtgctccagcctgggtgacagagtgagaccctgtctcaaaaaaaaaaaaaaaaaaacaaaaaaagaaaaagaagtgaagagacttagcactctgcagttatcgcgctttctctctgcacaaactcaaatcatttaaaaatgagttattttaatattttagtagttgaggccaatggagtcaaaggtacttgcccaaggccacagggcaaaactcggacatctaatctcgatgtttttgtttacactgaccttcaattcaaaataaatattgctcgctgttttattttctctacaaagaaaccatatgcagtggtagaaatgagcagtgtggtggcatcagaccctcactgtacatgctcttaaaaaagtgactcaaaggcttaaaaagtgacttaaagcctcacacctgtaatcccagcactttgggaggccgaggcgggcggatcacctgaggtcaggagtttgagaccagcctcgtcagcagggtgaaaccccatctctactaaaaatacaaaaattagccaggtatggtggtgaatgcctgtaatcccagttactcaggaggctgagacaggagaatcatttgaacccgcggggcggaggttgcagtgagcctagattgtgccactgcactcccgcctgggcgacagagtgagactccacctcaaaaaaaaaaagtgacttaaaataaatttttgtttgtgtgacagggtctcactttgtcactcaggctggagtgcaggggtgaaataatggttcactacagcctaaacctcccaggctcaagcaatcctcccaccgcagcctccctagttgctgggactatagggatgcaccaccatgccgccagctaattctgttatctttttgtagagatgagggtcttactatgttgcccaggctggttttgaactcctgggcttaagcgatattcccccctccacctcctaaagtgctgggattacaggcttgtgccaccacacccggctaaaagtgacttttcctttaacccagaaagaacgcttccaatctatactagtcagaaatctggaccagtgttaatgtggaaaatgctcaccacactcagctttaaaacggcaaaaaactagaaacacatgtctgaacataagaaaatggctttttaaatggcatattatgtagccactaaaatgagatttttcagggttggatgcaggactataagcataagcctataatctcagtgctttggaaggtcgaggcagggagaatcacttgagcccaggagttccagatcagcatgggcaacatagtgagaccgcatctctaccaaaaaaaaaaaaaaaaaaaaaaaagccaggcatggtggcacatcatgcctgtagttccagctacttgggaggctaaggagggaggattgcttgaacccaggaggtcaaggtggcagtgagctgtgattgtgccactgcactccagtctgagcaacagagtgagaccctgtctgaaaaaaaaaaaagagatacagagattttcaaaaagtatttaatgacataaaaagtacttaatgacatgaggaaaaattacaaaccacactgtgtgtttttctacacagtgaaaaatgctcactacactatagtagtgagcatatgtcactactataatcagaaaaaaaaggatgacacgatcctgtcacttattaatgactatggcccttaaaggggagatacatcctctgtggtttctgataacacagcttctgatatgaaaggcaattgcctcaagttaaggagatccatgaaagactgaggaattggatcagattacctcttaaattccttccaaagcttagctttaacgtagactcctccaacctgggggaattttctttagctctgcagaatgcagataaggatggtatttgttcagagcaaaggatagtaataacaatttccctgtgcatttctttttttgagtcagggtcttgctgtgtccctcgggctggagtgcagtggcaccatcacagttcacttgcagcctcgacctccctgggttcaagccatcctcctgcctcagcctccagaggagctggactacagatgtgagccaccatgtctggcccctatacattttgtcacaccagaaggacctgagaaatgtttgcattgttcaagtatttatttatcttggagtgaattctgcttcaattttgtctttctgttcttttcttttctgagttcattttaaaaaactgcatgaatcctttctagcagaccagagccacttgttgtcttggggtgatgggcttttacatgtagctggtctttctgtttaaacccaaaggatgggaaagtgcccttgacagctttcagcaaggatctctagcacttacaaaaagggggctttaggggagtcatgccaatctatggaggtcactgggctggaaccgatcaggctttcaacaaaaaaagtgttgatagaaatggacaatgggattccaggtactgaatccatatcattttaaactgtttatctttaggacttggcgcatctgctagagaaaaacagcaaatagcacatctaaaaacagcttggtggttttttgcatctttagagaaagctgctttaggagggtctgcagtatagacctcctgtatctgcaaggtgacagacggaggaccccaagccgtgggaactggtcacctactgtggggcccaggcctctccccactgcaggtcaagcccatcttgaagccaccacctgcttagtgctcaaggtcaccgctctcagcctggtccaggtgctgaaggatcatctcgacacgagggggcgccatctcctcacattgtgaggaagcctctggcatcgggatgaattttgttctagagctttccttctacaaacctcggtgttgttctcgctcacatgcaagaaagaatcggagtattgtgaggtctgcaaatgaaagggtcccttgccaaatgctctaatccaggctcctggtgtttgcgggcccagatagctacagtttgttgtcccctggctgcaaaccttctaggagtttctagctttagaaaccctagaaacaaaccccttctaatgtttcagctccacagcccctgcccacccagcccctcagacttcccatagcaacccaggttggagtcatctcgcccaggttttcatatctgctccacgggcttcacagaaaagtgctgctggcttggagcagatccgtaactctgatatcaaagtcctttttcttttggggctagggcagttcagggagaagttatgccactaaatgggtgccttgttggggaagacggtaatgactgtaggaatgaacaaatgataaacagcagaacattcttctgttcattgatttgaatcaaaacagactgtaaattgagatgaggaatgaatgtattaatagtaaactggacctgcttggtgcccttttttgatgtcatgaagcactctgcagttccagctgcggccaagccttggggcctgggggacctgggtcactggagtctggttatgatcctgttgttcctgcagaggcagcgtcaggttctgcagccccagggcctgggttggaattgcagcccttcccttcaccagctgtgtgacttgggcaagttgcctaacctcctgcctcatttccttacctggagaatggagatagtgatggtatatatcatgtaaattatgtaatgcctgcaaaacatttaacgcagcgtgggcaaggagtcggcacaccacaaactagagctgttactctcatccccaggatgcagtcccctctaaatgcagtattttgtctttcaatagaggcaagatgaatgcaaacatggatcatgcttcattatggattttttttttttgagacggagtttcgctctgtcccccaagctggagtgagtgcagaggcatgacctcagctcactgcaaccactgcttcctgggttcaagcgattctcctgcctcagcctccagagtacttggaactacagatgcgccccaccacacccggctaatctttttgtatttttagtagagatgaggtttcaccatgttggccaggctggtctcgaactcctggcctcaagtgatctgcccgccttggcctcccaaagtgctgagattacaggtgtgagctaccgcccccggccttccattttggaatgttaatgctttgtttcattaccttctttttttaaatttttatttattttttatttatttttatttttttattatactttaagttttagggtacatgtgcacattgtgcagcttagttacatatgtatacatgtgccatgctggtacactgcacccactaactcgtcatctagcattaggtatatctcccaatgctatccctccccccctccccccaccccacagcagtccccagtgtgatattccccttcctgtgtccatgtgttctcattgttcaattcccacctatgagtgagaatatgcagtgtttggttttttgttcttgcgatagtttactgagaatgatgttttccaatttcatccatgtccctacaaaggacatgaactcatcattttttatggctgcatagtattccatggtgtatatgtgccacgttttcttaatccagtctatcattgttggacatttgggttggttccaagtctttgctattgtgaataatgccgcaataaacatacgtgtgcatgtgtctttatagcagcatgatttatagtcctttgggtatatacccagtaatgggatggctgggtcaaatggtatttccagttctagatccctgaggaatctccacactgacttccacaatggttgaactagtttacagtcccaccaacagtgtaaaagtgttcctatttctccacatcctctccagcacctgttgtttcctgactttttaatgattgccattctaactggtgtgagatggtatgtcattgtggttttgatttgcatttctctgatggccagtgatgatgagcattttttcatgtgtcttttggctgcataaatgtcttcttttgagaagtgtctgttcatgtccttcgcccactttttgatggggttgtttgttttttcttgtacatttgtttgagttcattgtagattctggatattagccctttgtcagatgagtaggttgcgaaaattttctccaattttgcaggttgcctgttcactctgatggtagtttcttttgctgtgcagaagctctttagtttaattagatcccatttgtcaattttggcttttgttgccattgcttttggtgttttacacatgaagtccttgcccatgcctatgtcctgaatggtaatgcctaggttttcttctagggtttttatggttttaggtctaacgtttaagtctttaatccatcttgaattgagttttgtataaggtgtaaggaagggatccagtttcagctttctacatatggctagccagttttcccagcaccatttattaaatagggaatcctttccccattgcttgtttttctcaggttggtcaaagatcagatagttgtagatatgcggcgttatttctgagggctctgttctgttccattgatctatatctctgttttggtaccagtaccatgctgttttggttactgtagccttgtagtatagtttgaagtcaggtagtgtgatgcctccagctttgtccttttggcttaggattgacttggcgatgcgggctcttttttggttccatatgaactttaaagtagttttttccaattctgtgaagaaaggcattggtagcttgatggggatggcattgaatctgtaaattaccttgggcagtatggccattttcacgatattgattcttcctacccatgagcatggaatgttcttccatttgtttgtatcctcttttatttccttgagcagtggtttgtagttctccttgaagaggtccttcacatcccttgtaagttggattcctaggtattttattctctttgaagcaattgtgaatgggagttcactcacgatttggctctctgtttgtctgttgttggtgtataagaatgcttgtgatttttgtacattgattttgtatcctgagactttgctgaagttgcttatcagcttaaggagattttgggctgagacaatggggttttctagatatacaattatgtcgtctgcaaacagggacaatttgacttcctcttttcctaattgaataccctttatttccttctcctgcctaattgccctggccagaacttccaacactatgttgaataggagtggtgagagaggccatccctgtcttgtgccagttttcaaagggaatgcttccagtttttgcccattcagtatgatattggctgtgggtttgtcatagatagctcttattattttgaaatacatcccatcaatacctaatttattgagagtttttagcatgaagggttgttgaattttgtcaaaggctttttctgcatctattgagataatcatgtggtttttgtctttggctctgtttatatgctggattagatttattgatttgcgtatattgaagcagccttgcatcccagggatgaagcccacttgatcatggtggataagctttttgatgtgctgctggattccgtttgccagtattttattgaggatttttgcatcaatgttcatcaaggatattggtctaaaattctttttttgttgtgtctctgcctggctttggtatcagaatgatgctggcctcataaaatgagttagggaggattccctctttttctattgattggaatagtttcagaaggaatggtaccagttcctccttgtacctctggtagaattcagctgtgaatccatctggtcctggactctttttggttggtaagctattgattattgccacaatttcagagcctgttattggtctattcagagattcaacttcttcctggtttagtcttgggagagtgtatgtgtcgaggaatttatccatttcctctagattttctagtttatttgcatagaggtgtttgtagtattctctgatggtagtttgtatttctgtgggatcggtggtgatatcccctttatcattttttattgcgtctattagattcttctctctttttttctttattagtcttgctagtggtctatcaattttgttgatcctttcaaaaaaccagctcctggattcattaattttttgaaggtcagttctgctctgatcttagttatttcttgccttctgctagcttttgaatgtgtttgctcttgcttttctagttcttttaattgtgatgttagagtgtcaattttggatctttcctgctttctcttgtgggcatttagtgctataaatttccctctacacactgctttgaatgcgtcccagagattctggtatgttgtgcctttgttctcattggtttcaaagaacatctttatttctgccttcattttgttatgtacccagtagtcattcaggagcaggttgttcagtttccatgcagttgagcggttttgagtgagattcttaatcctgagttctagtttgattgcactgtggtctgagagatagtttgttataatttctcttcttttacatttgctgaggagagctttacttccaagtatgtggtcaattttggaataggtgtggtgtggtgctgaaaaaaatgtatattctgttgatttggggtggagagttctgtagatgtctattaggtctgctcggtgcagagctgagttcaattcctgggtatccttgttgactttctgtctcgttgatctgtctaatgttgacaatggggtgttaaaatctcccattattaatgtgtgggagtctaagtctctttgtaggtcactcaggacttgctttatgaatctgggtgctcctgtattgggtgcatatatatgtaggatagttagctcttcttgttgaattgatccctttaccattatgtaatggccttctttgtctcttttgatctttgttggtttaaagtctgttttatcagagactaggattgcaacccctgcctttttttgttttccatttgcttggtagatcttcctccatccttttattttgagcctatgtgtgtctctgtatgtgagatgggtttcctgaatatagcacactgatgggtcttgactctttatccaatttgccagtctgtgtcttttaattggagcatttagtccatttacatttaaagttaatattgttatgtgtgaatttgatcctgtcattatgatgttagctgattattttgcttgttagttgatgcagtttcttcctagtcgcgatggtctttacattttggcatgattttgcagcggctggtaccggttgttcctttccatgtttagcgcttccttcaggagctcttttagggcaggcctggtggtgacaaaatcgctcagcatttgcttgtctgtaaagtattttatttctccttcgcttatgaagcttagtttggctggatatgaaattctgggttgaaaattcttttctttaagaatgttgaatatcggcccccactctcttctggcttgtagggtttctgccaagagatccgctgttagtctgatgggcttccctttgagggtaacccgacctttctctctggctgcccttaacattttttccttcatttcaactttggtgaatctgacaattatgtgtcttggagttgctcttctcgaggagtatctttgtggcgttctctgtatttcctgaatctgaacgttggcctgccttgctagattggggaagttctcctggataatatcctgcagagtattttccaacttggttccattctccccatcactttcaggtacaccaatcagacgtagatttggtcttttcacatagtcccaaatttcttggaggctttgctcatttctttttattcttttttctctaaacttcccttctcgcttcatttcattcatttcatcttccatcactgataccctttcttccagttgatcccatcggctcctgaggcttctgcattcttcacgtagttctcgagccttggttttcagctccatcagctcctttaagcacttctctgcattggttattctagttatatattcttctaaatttttttcaaagttttcaacttctttacctttggtttgaatgtcctcccgtagctcagagtaatttgatcgtctgaagccttcttctctcagctcgtcaaagtcattctccatccagctttgttccgttgctggtgaggaactgcgttcctttggaggaggagaggcgctctgcattttagagcttccagtttttctgttctgttttttccccatctttgtggttttatctacttttggtctttgatgatggtgatgtacagatgggattttggtgtggatgtcctttctgtttattagttttccttctaacagacaggaccctcagctgcaggtctgttggaataccctgccgtgtgaggtgtcagtgtgcccctgctggggggtgcctcccagttaggctgctcgggggtcaggggtcagggacccacttgaggaggcagtctgcccgttctcagatctgcagctgcgtgctgggagaaccactgctctcttcaaagctgtcagacagggacatttaagtctgcagaggttactgctgtctttttgtttgtctgtgccctgcccccagaggtggagcctacagaggcaggcaggcctccttgagctgtggtgggctccacccagttccagcttcccggctgctttgtttacctaatcaagcctgggcaatggcgggctcccctcccccagcctcgctgctgccttgcagtttgatctcagactgctgtgctagcaatcagcgagactccgtgggcgtaggaccctccgagccaggtgtgggatatagtctcgtggtgcgccgttttttaagcccgtcggaaaagcgcagtattcgggtgggagtgacccgattttccaggtgcgtccgtcacccctttctttgactcggaaagggaactccctgaccccttgcgcttcccaagtgaggcaatgcctcgccctgcttcggctcgcgcacggtgcgcgcacccactgacctgcgcccactgtctggcactccctagagagatgaacccggtacctcagatggaaatgcagaaatcaccgtcttctgcgtcgctcacgctgggagctgtagaccagagctgttcctattcggccatcttggctccttattctcattaccttcttgagttgtggctcagacactacaacagagctctgtcacctctttctaaaagctgggaaatggttattgtcaacgccagccccattttggaggcacctggttgcaggggaccacagctaggtgagtcacaactgggtgtcttcatcagggggtttacaagggaagacagactagtgattttagaacaatcagcaatcagggcacattggcaagcaagcacagagcaagatttattttataaaaaagagcgtttatgtttggttcaaacaaaaatgtgagaacggccgaggctttgtaggagttcaccacgaaaaaggaaattacatggtaaaaaaaaaaaaaagaaaaaaaagaaagataaattctacatttttttctttatataattatttagctggagcaaaagtgaaagtaaaagttggggcaaggaaacacattcagatgtggggaagtgctcccagaacgtgggacagcgagtggcggagtccgattttgaaatgctccagagagaatatgatcttcctggaccccacagtgggatgcaccaccccaaaaaccattggcaaagtttggtgacagaggaatcattttgtttctttttatgcataaagaacacacagaaaggaacacttgctttgaggatcctggtaaatcaggctggtgttctgttggggcagtgcagtttggtacaaggaagtggtcactgctgaccccacggagaggctgggaaaagcgtagatgaggtgactggagaataaaggaggctttttctagctcaaggtttaaaggcagccacagtgtctgtagcagatgaattagtgtgaccttggagatggccccttgacccgaaagtggtaaagaatgccatacttttcattttgcaggacacctccttgggggaggctgggctggtagcatatttctacgggcttatggttctgtggatagaattgtagggctggataaaagcactggctattttgagtttttaagcaatcagggggctattagtggggtggtctttgggaaccaaggccaaatctgcaggacagcagagtaattcagatcatctatattgtatggcttgaaatgggatagaaagccatctttattcattcattcattgcaggcatgaactctttaaacaaatatgagtggcctatttgagatcatgatagaaattgtagggaatagagaagcaaccaagactgaccctataaggagctgtcaccaactccctttgaatcaattttaacttttttcttttttttgggacaaggctttcacccaggatggagtgcagtgatgcaatctcggctcactgcaacctctgccacctgggctcaagccatcctcccacctgagcctctcaagtagctgggaccacaggcgcacatcatcacactcggctactttttgtattttttgtagagatgaggtttcatcatattggcaaggctggtcttgaactcgtgagctcaagcgatttacctgcctcagcctcccaaagtgctgggattataaatgtaagccatcatgcttggcctgaaccaattttaacttttaaaaatcaccttttctttgttatacattcaagaagacactgagatgggcattagactaacatcaagctaagttgcatataatttcataaactctgagctttcttgaatatattttttaatttgtgggaattccttgtacacctgagccccaaagacacagcaaactccagtcatagcttggcaattaaatgaagcaatgaaagagagagaaaaaaaatgataaaaacaagtcattccagttggcagagcctcacagtacagttctcaaagtggctgttcatcagaaatgaagttggcaccatcttagggacattggatcaagtcagtccatttgtgacaaggacaaaaggagtagtagtctttccttttgtgatgtgtgacagcactgctcaccctggaattaatggggtttatataatccagatttgctgatgtcctcagggcctggaaattttccttatttgtgttccaattctaaaggtttcctgagaatattctagaagtagtctttcatggtagccatcaatcctggctactgattgaagtcaactgtagagcttaaaaaatgacagatgtccaccaaaggcctatgaattagaatctgccttattttattttattttattttttcgagacggagtctcactctgtcacccaagctggggtgcagtggcacgatctcaactcactgcaacctccgcctcccaggttcaagcgattctcctgcctcagcttcctgagtagccaggattacaggcatgcaccaccgcaccagctaatttttgtatttttagtagagacaggatttcaccacgttggccaggctggtctctaattcctgacctcaggtgatccacccacctcggcctcccaaaatgctgggattacaggcttgagccaccacccctggccttattttatttttaattaattgttgagcttgaatattcagtgattgaacagggattaaatatcccagcatatctatggtggaacgctatgctgctgtttaaaactatggtgaaaaagaatttgttgacctgagacaatattcataatgccttgctaagtttttttttttttaaaagagcaggctcaaattcaagaaagagtagcctgtgtataaatgaggtttttgttaaataattgtgtatttatacacattatataaaaggccagaaagaacctcaaaaactgttgacagtgttggcttctgagcaatgatttctgtttgtctttttttttttttttttttaagacagagtctcgctctgttgcccaggctggagtgtagtgacatgatcttggttcactgcaacctccaactcctggattcatccaattctggtgcctcagcctcctgagtagctgggattacgggcatggtcaccatgcccagctaatttttgtatttttagtagagacgggggtttcaccatgttggccaggctggtctcgaactcttggcctcaggtgatccattcgcattggcctcccaaagtgctgggattacaggtgtgagccaccatgcccagccttagttatgtttcataataaaaagaagacactccaaatggaaggttacagctgaccttagggacagtgtcccctttgatgacttgggacctccccttatgggagcagagacagctggccggttgcaatgggtctgtaggtcctgaactgaaagtgtgacaggtttctagggtgggactggagtgaaccaaatatcttgataggataaattttgcagaaatattttatacaagtaaaatcaacactgtggactcagctttgatgtttttaaaaaatttttgcatgctaaattaaaaaaaattgtattgccccctgctttattgagacataattgacaagtaaaattgaatatatttaaggtacagaatgtaatgacttgatatacataaacattgcaagatgcttaccacaatcaagttaatgaacgtattcataacctcccacagttacttttggatgtgtgtgtatggtgagaatacttaagttcttctctgttagcaaatttcaagtgtactatacattgttattaactatagtcaccatgctatacattaagtctccagacaaaacagttttaaacacattattctaaagtatccctggagctaacaattatatatgatcccccttatttctcatatttcttttcttttctttcttttcttttcttttgagaggagtctcgctgtgttgcccaggctagagtgcagtggcacgatctcggctcactgcaacctccacctcctggttcaagggattctcctgcctcagcctcccaaatagctgggattacaggtgcctgctgccacacccagctaatttttgtatttttagtaaagatgggatttcaccatgttggtcaggttggtttcaaactcctgaccttaagtgatccacctgcctcggcctccaaagtgctgggattacaggcatgagccaccacacccagcctgtttgtcttttctttagtgtttctctgtggttttggagttttaagcattaatctcacgttacttttgtactgaggaagaatcccctcaataaatattaatgctttccccttcagggacaacatggtgaggagcagcaaagaagaaacgagatacgtgtggctgcttcatttactcattcatgatttttggttagcctttgaaagtttatttttcaattttatttagtcttttttttgtattcataaaggaaaaaaaaagggtcttcagtgcttgtgtgagcctggcacttggttttatgcccttgggctgtagaggtcagtttctcaagttcaactgctacagttctttttgccttttttttttgagccaggcagggtctgctctgtcacccaggctggagtacggtggtgcgatcacagctcactgcagcctcaacctcccggactcaagtgatcctcccacctcaacctcccgagtatctgggaccataggtgtgcaccaccacatccagttaatttttttatttctggtagagatgggatcttgccatgttgtccaggctggtcttgaactcctgggctcaagcaattctcccacctcgacttcccaaagtgctgggtttacaggcgtgagccactgtgtttggcccaagtgctgcagttcttactctccagctcacagaagaggcaacgaggagcctgttgaaatgcagattctctcccaagaggctctgtgaagtagtcctgggtggggccaggaatttcctattttaaaccagctcctcatgtgattctgagctatctggcacgggtctctgagaacctgtaaatggggcttaaattgctcaaagcctaaagacaatgaaaagtggcagaatgtgaagacccggtttgttggtttcaccctggaatctcaactgagttcccccagaatgtccctggacccatgaccctcagctgaaatgtcttagtttagaatgtgacatgtctaagtgggatgacaatcaaaatagacccagctgggaagttgccagcatccttgaaggttgttagatgtggcaaacaccttccttccttctttaagggtggtaagaaaacaacagctcaggaagtcataataattctaacagcagcatctacttagcactgtctaagcacttcatgttcatttactcatgtaatcctccccaaacctataggatgcctataggtaaaatcatccccattttacagatgaggaaactgaggtttagagaggtgaatgatcttgcccaagactacatggccaatcagttagcttgcctccaaagaccctgggcttaactgctatattatccaaccccaaactctaccagtggccactgtgcaaattctggctgtgtggctgcctccagggttcaagaatattgaccattgcctggcagcttgctgcttgggggcccctgctgaacattttctggtgtgaaatcattatttaacttcaaccttctaaaactgtgcccttcatggtcccagctagcacaaaggtaaaaacacttgataaaacgcataaaacacagccagcagcgtatttccaaatcacgttgtaagccaggcagcgttctcttgaaacatacatccttgggggcaaagcagttaagagaggttccactgcagtgtgtggactggggtgttcactgaaccagacaaagctgggggttttgggatgccagaggcctgtagtgggaacagctaggggaggactgcagccaatctggatagtggcaacaggacagggaaattgactctagtttttgctcagtagcaaaactgttttgaaagagaatctctcctctacctcacccccaggcatgttttttaagtctttaaaaaatactgttaaagcaaactatatatggatatggcctgaaaaggactccctacttcttcttttttttttttttttgagatgaagtcttgctttgtagcccaggctggagtgcagtggcacgatcttggctcactgcagccttcacctcctgggttcaagagattctcctgcctcagcctcctgagtagctgggattacaggtgtccactaccatgctaagctaatttttcgaatttttatatttttagtagagacagggtttcaccatgttggccaggctggtcacaaactcctgacttcaagtgaactgcccaccttagcctcccaaagtgctgggattacaggcatgagccaccgtgcccggccccggacttcctacttccatatttgagtccttgtggacgaactgcaacctaactttgaaacagattgaaaccctaatttaggattatgacaagattgaaatcctaattgaggagtatgcagctgtaacaattgccgagtcttggccaatcccagcagccttacttcaaccgctcatacactgctgagtgttcacactctgttcaaataaggcaaacgccgagctgtaaccgatccagctgtttcagaatctcacctccgatttctgtacgtcacttccttttttttttttttttttttttataaatttgttcagacccgagtcatccctggagtctcacacttgatcttagccaaaaggccgagaagcgatcatccctggagtctctctgaatctgccgtgatcctgggggctgcccgattcgtgcattgttcattgctcaattaaactcctttaaatttaatttggctgaagtttttcttttaatgatactatgatgtgtcattattatttcacttttcaaattattcaaaattattttcaattttatggtatggtacataccgtaaaatttctgtactcttttaaagcttacatttcagtggttttcagtatattcacaaggttgtgcaaccatcaccactatctggttctagaacattttcttcacccccaaagaagcttcatacccattagcggtcactttccattccttcttccccacagcccctggcaaattctgacggttttaatggttaaatcttttcaattacatcacaagacaccatggaactcattactctttctggcacatagtaggtacttagtaaattttttttttttgtgataaagctttcaattaagactttctactctttttgctggcatatgtgataattttaaaattatagtccaggtgcggtggctcatgcctgtaatcccagcactttgggaggccaaggtgggttgatcacctgaggttaggagttcgagaccagcctggccaacatggcgaaaccccgtctctactaaaaatacaaaaattagccaggcgtggtggcttgcacctataatcccatctactcgggaggctgaggcaggagaatcacttgaacccggggggaagagtttgcaatgagctgagatcacaccactgcactctggcttgggtgacagagcgagactccatctcaaaaaaaaaaaaattgtgttaaacatctagaagaagacgacatacagctgagttggattttttccccctcctctcccatttagaaaagtctgaactcagaggtctcatgtcaactggataattgttttattggccttattcttaacttagtgtgatttaggaaaagacaaggacatctagagtcatgttgtaatcacagttctgtgatatttcatgtttttctaactcataaaaatacagtgaggaaatcaacagcttggactgtgggaaaagaagtaaagctgaaactctgatacgcacaggcctgagtatgttgtttacagaatgaaaagcgagttccacataagctgagacttggcttcagtcatgcctgggaatctacaaactcaatgccctctcactggcagaacataaaagctaaagattacccctaatcccgtggcattttaaaatccatggaatgggctttggtgctcagcaattttcacttaaagtcacacactcttttggaggtacaaatgtttcagttcccccagtagtatctctggtaagacttaccagaatgaatattgatgcagatgaagacacgattgttctgtccagaagtgatcacactccccttcacccccaagttccactttttaaacaattcaaataatggaagctcatgtgacagctttctgctggtaaaccagagaataagattcactgcactggaaaaaaagtggaaaccactcacatatttatcaatggatgcatgagtaaacaatatctggcatatccatacaatggaatattattcagccataaaaaggaatgaagtactgacacatgctaccaccctgaaaagatgatgctggccgggcgcagtggctcacgcctgtaagcccagcactttgggaggccaaggtgggtggatcacctgagatcaggagttcaagaccagcccggccaacatggtgaaaccctgtctctactaaagatacaaaaaaaaaaaaaaaaaaaaaaattagctgaccacggtggcaggcgcctgtgatcccagctacttcaggaggccgaggcaggagaatcacttgaacccaggaggcggaggttgcagtgagccgagatcgtgacatggcactgcagcctgggtgacgagagcaaaactatggctcaaaaagaaaagaaaagatgatgctgagtgagagaagccagatgacacaaaagtctacttgtatgattccatttatatgacgtgtcagcagaaaaacaaacccgtagagacagaaagcagatgagtggtttccagggtccggggaagggaaaagggaagtgactgctaacgggtaaggcattagctttagttagttgatttctttttggggtgatgaatattctggaattaacggtgatggttgcacaactttgtgactatactaaaaacactaaattgtatagtttcagagagaaattttatagtgtgtaaactacatctcaattaaaaaaaaaaaaagtaaaaagaaaacgctgcataagcctcccgtggggttaaaataagagtaagagaaaaaaacatgacttcattgtgtgggtgcctgtgttgaagatgatttagtagcttctgccgtgaggcatttgctagaataaaatcctttctgccctcatcattgtcagcacactggttcgggcctttagcactcctacctggatcgtggaactaaagaattttagcagctgacaaggaccttaaagattgtagcctaactctctcgcttgtcaggggaggcagctggtgccaggcagaagaagtggcatgtttggagtggcctgcctggtgtctgagccacacctgacacccagtgttctttccactgggcctttattgcaattgttttcctctctctttagtctcttcctgctccagtaggattgtacattccactgacctaatcttcccgaaatacagatctcatcacgtcactgccctgctgaaaaaacccacagtggctccccactgccttcaggcccagaccccgggagcctccttcaccttctgtccacttcttggctctcatggcttcctaaacaaactccctttgccactgcagcacatggcgtgtgtcccaatatcacgcttctgggcacatgttgttaatccactttgcatatgtttatgtctttgtggctcagctagattgcaagtttctcggagaccaggatcatgcctttgacctcctgacacagggcacagtgcaattccttgtacttgttaggggtctggaaatatttgtagattagttgatttcattcacaaccacagctagtcttcacctggtacacctaagaatatcttggaggaggccggttgcggtggctcatgcctgtaatcccagcactttgggaggctgaggtgggcggatcacgaggtcaggagatcgagaccatcctggccaacatggcgaaaccctgtctctactaaaaatacaaaaaaaaaaaaacaaaaaattagctgggcgtggtggcatgcgcgtgtagtcccagctacttgggtggctgagacaggagaatggcttgaaccatggagttggaggttgcagtgagtcgagatcatgccacagcactccagcctggtgacagagtgagactccatctcaaaaaaagaaaaaagaaaaaatcttagaggagttctggcaacaggtcactgttttatgctgcgtctctcatgagtttaacttttgggtgtaatctggacaagaagattctcgaaacctcctatgagattggatttactgtcaaaaaagcaaaacacactgacttcaaaagaaaaaagcaaacattatttttgaaacaaccttttaatttcttatagaagtactgtaatttgtgttcttggagatttagaaaattcagagaaagttccaagaaaataaagaagaaaattgaaagctcccataatcctagcccctaggggctgtctattgataatctttcatttttacagccatttttctatgcacacacaaacaccacatatatattctttacaaaaatgagattccactctgtatactgttttatatcatgcttttaaattaagataaaaattaaaatttaataggactgcattaagtgggaacaattttgctgctgtcaactcgagagagcattccaatgacacagagaaagagcaactccctatttgttttgcttctttgcaaaacaaacagggtaagaagagttctgagaactaaggggcaaggtgccttcctagctgccgacttgagttgggcgtggagttgcttcatctccttctctgtgtctcctcaccagttctattgaaggaattggagcttgtacccatgaaggtccttttctagtttttggattttgtaagctttgttttacatttctcccatcccttctttgtgaatatttcagagccctctactcaagagggtaggggatgtggctactttgttccctgttttgttgccagcatggtgcctggcaaagaatagacactcaataaatatttggtaatgaatgaatgggtgagactctcatgagtgatgtcctttgttatggaaatcactaggccacatggtcttcttttggaagcaccaagtaggaattctatatttaggttcttggaattgaaataataacacaagtgacattgtacattaatcaattaatggaatatatgtagctgtggccccatgagggagttcttgttaattccattccacaagtggccagggtccactgctagcctcatgatcccaggtcccgggtcccctctgctaatcttcacttttgggcaccacggtttctctctggttgggtaagtcattccacgaccagtaaggcaagcttaaggccgaagttttcaaatgtcagtgttcttaagaattgcccaggccttactaatcccattttttttttagatggagtcgcctaagctggagtgcagtgacatgatctcggctcactgtaacctctgtctcccggattcaagcaattctcctgcctcagcctctggagtagctgggattacaggtgtgcaccaccacacctggctaatttttgcatttttggtaaagacagggtctcaccatgttggccaagctagtcttgaactcctgacctcaaatgattcacctgctttggcctcccaaagtgctgggattacaggcatgagccaccacccctggccagtgatccacattttaaataattgcttgctatgatttgaatgcaggtggtctgaaacctatcgagaacactagcttgaaacatttcagattcagtgttttgtaaagcagaggagaggccatgattggccattaggagcttcatcaagcgtcagcttgcccacagctttggtttccagggagactgggaagtaacaatacaatagttcatcttcattatgagtgtaccatgccaagagctttcctaagtgctttacattcattatcctctttaattctcttaagaattgtatgaggtaggtcctattattacctctatcttacaaggaaactgaggatcagacaaggatatctagcttatccatgattaggtagagctgacaatgggattaaataatcaagtcctgctactgccaggttaagaaaacccagctctttgttgttttataacaactgggggaagctggtgtgcatcattggctgataggaagagaaattgaattccacatctatgtcctacttcatgcatggattgctctcaacaaccgtgaaacggaatacaaaacagtgaaacaggtgaaattcacatcttgtctttccgtgtgcatactcttaggaccagccctggccatgttctgtatatgaccactttaacctcaaaactgtactgttaaaactcaacaataagaaaaggaacagtccaggccaggtgtggtggcttacacctgtaatcccatcactttgggaggccaaggctggtggatcacttgagcccaggcatttgagaccagcctaggcaacgtggcaaaaccccgcctctaccaaaaaaaataaaaaataaaaaaacaacaacaaaactccaaatcgtggttgtgtgcacctgtagtcccagctactcaggaggctgaggtgggagaattgcttgggcccaggaggtggaggttgcaatgagctgacatcacaccactgcactccagcctgggcaatagagcaagaccctgtctcaaaaaaaaaaaacaaaaagaaaaagaaaaaatgaaaaggagcagttcaattaaaaaatgggcaaaagacctgaacagacacctcaccaaagaagatatatggataccaaataagcatatgaaaagatgttcaacatcatttattgttagggaattgcaaataaaaatgacaaaagatacaactacatacctattacaagggccaaaatccaaacactgacagcaccaaatgctgacgagaaagtggaacaacaagaactctcattctttgctgctgagaatgcaaaatgatacagacactttggaagacactttggcagtttcttacaaaactaacatactcttaccacatgatccagcaattatactccttgatatttacccaaatgagctgaaaacatatccacacagaaacctacacaggattttataactgctttattcatagttgtcaaaacttggaagcaaccaagatgtcctccagtaggcgaatggaaaaacacactgtggtacatccagacagtggaatattattcagtactaaaaggaaatgagctgtcaagccatgaaaagacatggaggaaatttaaatgcgattatgaagtgaaagaaaccaatctgaaaaggctacgtatgattccaactatatgatattttgaaaaaggcaaaacggtggagatagtggttgacaggggttggagggagggcaggatcaacaggcagagcacggaggatttgtagggacgtcaaactgttctttatggttctgtaatggtggatccatatcatgatacatttgtccaaaccaaagagtatacaacaccgagaatgaactccaatgtaaactacagacattgggtgataatgatgtatcagtgtaggttcactgattgtgacaaagatcatcctctggtgggggacgtccatagtgggggaggtggtgcatgtctgggtgcagtgggcatatgggaagtgtactttctgctcaattttgctgtgaacctaaaactgctctaataattcaagttcattaattcaaaaagaacccctgaattgttttaacagggatatttgaatattgagtactgaccagatatttactgatattaagaaattgttggccaggtgtggtggctcacacctgtaatcccagcactttgggaggccaaggcaggtggatcacctgaggtcaggagtttgagaccagcctggccaacagggtgaaaccctgtctctactaaaaataacaaaaattagctgggcattttggtgcatgcctgtagtcccagctatttgggaggctaaggcaggagaactgctcgaacccaggaggtggaggttgcagtgagccaagatcatgccattgcactccagcctgggcaacagagcgagactccatgtcaaaaaaatagaaaaaaaaaaaaaaaaaagaaattgttggggttttttttcaggtgtgatactggtattgtggttatgtttttaaaaagtctttatgtttttagctgggtgcggtggctcaggactgtaattccagctacatgagaggattgcctgaggccaggagtttgagaccagcctgaacaacatagtgagtacctgtctctaaaaaaaaaaaaaaaaaaaaaaaaaaagtctttatattttagagttatatactgtaatatgtatgaatgaaatgctatgaggttttagatttgtttcaaaacactccaatgtgtgtgtgttgggaggaagtagataaaacagggctggtgataggatgataattgttgaagctagctgatgagcacatagagcttgattacactattacttcaagtttgtacatgtttggacatttccataatgtaaaaacacaattacatgcttcaagtctcaatccctaggtctcttacactctgggaatggatttaataaatttagcaaatgcacctgaggttaataatggatttatacattgctgtggctacagaacatttacattttgacacaggtcttcaatatcttaatctaaataagcaaatattgtggaaatttcagacattaccccaatctgacagggcaaatatttttattagttctaactttccccttccctaatttacttatgtatagaattggtcctcatccctgactgtggggagacttttgatagttattaccttttctttctttctctttctttctttctttctttcctttctttctttctttctttctttttctttctttctttctttctttccttccttccttccttccttcctttctctctctctctctctctctctctttctttcttcttttttgagacagagtttcactctgtcacccaggctggagtgcagtggcgccatctcagctcactgcaacctccccctgctgggttcaaacaattctcctgcctcagcctcccgagtagctgggattacaggtgatgcctggcgaatttttgtatctgtagtagagacggagtttcaccctgttggtcaggctggtctcgaattcctgacctcaggtgatttgcccgcctcggcctcccaaagtgctgggattataggagtgagccaccacctccggccaactattaccttttctaagaatgctttatgacatcatggcatttcaaattgtgtaacattcagaacgttttctgttgtatcctttcctaggtcttcattactttcctgggacttgacagggcatattgaatctatcctgtaatgcatgggaataaataaggattccaaaacgtgaattggatttagttaatttttgtttctccatgtctccatacacacaggcagcatgagtgagcatctagtatgtattggatatgtgctgggttgataccataaagagatttataaaatggtgccgactttgaggggttcacactctgggggaaagactgtgctgtctaagtgaataaatttggagattgagggcttcatggagaggaggaaagttgtgctttataacatcatggcatatttgcatgagccatgcaaataagaagctcatcacccacccgatttatgtcagaatcagaacccaaagccagggacccaccaaccaactgttcggcccagcacagtttccctgtggcaattccacttctttttttcttatcttacgtcgcagtgtactttgtctcttgtaactcctgcaggatttttcttaaagccttacatggtgctgttatcacgtggcacaaaatgaagccgacctctttgtgtgtgggaatagagggagcattacactgctgggatgcaacagatggagggtggaaagctgtccagcaccttgtctcttccaagatacatagcccaggggtattcccattcctccacgacacaaatgacaacttccttgagctctgatggcttgccaggtggctgatggcgtggagaaccttgctcatgtttacctgttcttgcatccattactcacctctgcccacgtgcccccacacttgcacacaaagccacagagtggcttaaaaaaaaaaaatgaaaagcctccccccaaccctattgtaaaatgtcaagtgtttcagttttgagaaaaaagaaagctgaagaaaccatgactcatgacatgggctgacaaacaacgatctgaaggtatgctggtgagtcacactgtggagctctgcctttgtgttgtggtgagggccggggctggaaggagtgtcatgggaccagccagtaaaattccactactctccgaagccgattgggaggcaatttaaaaaccctgggctttttccagccccagtgtagtggatgactctgggtcccctcaggtatgtcgatctgtatgggaaatcaggaagaatgattattaataactggaaaaaaaaaacctgttagtatctttccatgcccaatgccatgctgaaccagccctgcctgcttctgcaagccagcgaggctgctggattttctcgaagggtattgagttgctaagcaacagcactggcggcgcctatcatgcccagcgatgtcaatgcctgagtgtggcctgcagagcacatttgctcccctccccctcgcctcctctcgaccccttccccccactacatgagaacattaatttgcatctcagggacaggagctgtgccaggtgattctgtgtataaaacagcgcagtgcagcccctgaagcacaaatattgttttgggttgcaaggcggtgcatgtgacgtagttgaaaatacagactcatttgtgtatactccccacgtaaggagggtaggcttcatctaaaagcctgcgtgtcaaatactcctttctaatacatcctggtgtgctctgccttgaagtgtttttttcctgtctgcccatccagcatcttatttatgccccattctgtccctctctctcgttgcctttgttctgtggtctcctgggtgatggagttattgtttgtgtgtagggatgtgtggataaaagggagctgatttctagaggtgagatggccctgtggttaacggttggaggctgctgttgacaaggcctgttgctgtggcagttttgctccggaagtggccattttctgggcagggctccaccagagcaccatctgtctgtgccttttacttcctgtcaagaggcagcaggcttcgtgagctggggaagtgccagaagcagccttcgaattagacagacctggacccaaaccctttctcttccccccacccattttggcatcttggcacgagactgtccccatttctggaaagggtgttcacaagaacagtctggctgggttgttgggatgaccgagtgtgatcatgcgtctctatggctggccatggtgtttattcgatggcaggtattaccaggatggagcgagtcccagtaggaagggcctttaggatgtcatctggttccacccaacagggatgggaactgtaattccccactctccctgtggagaatcagggcgggctccggatggatggccaaaggctgcacagaggtgagcctccagggttgggttctaagcgctgttcacactcctgtcccagtggtgtttggtctggggcacattgtgatatgtgtttccctcctttcttaaaattagctcttggcttcagggccttgtagtggactgatgtccctccttaactgaacagtcagtctgcttatttttttggggtggtttaggggtaaaaataagtagataactgaacaaagctggctggcaggaaccttcggctgaccgcagggctttggtggtggtcaagacctggaattggatttgaggcctggccagcgtgaaggatatgccataggagcccaggaggatgactctgccaggcctgcttttgacatgtctgtcatgcttcatgctttatgctgctctgggccattaagcaagaactaaatctgatgcccaatcaaggctgagctctttttttttttgagacactgtctcactctcttgcccaggctgtagtgcagtagtgtgatcatggctcactgcagcctcagtctcctggactcaagtgatcctcccacctcagccttctgagtagctgggagtacaggtgagtcaggtgagtcccaccacacccggctaattttttttttttttttggtagagatggggtttcactgtgttacccaggctggtctcaaactcctgggctgaagaccatccactcgcctcagcctcccagtgttgggactataggcgtgagcactcatctagtctaggctgagctcctaaacaggaaatgtgtggcatggcttctttgaaggtggctttctcattctgagttttaaaccacaaccactgaagatggttagtgcctgcagaatgcgtaccatttccactcagagaaaccattcctccttaaggaaagctggggccgttcctggtctggcgttcccagtgaaggaagaaccaagtggatgcccctcaaccccagcccgaggcagctgtgtcgttatggtccagctgggcaccccactctttaggaggtggagagggaaacagggggattggtctaggtttgtgtgggtcagagccaggtgagaagttatagtagttgctgggcaaagtaaataagaaggagacagaaaggcccaggcacgcaggagaccccagctaaaagggcagggagagggacacgttggtggtcaagaagagggaaatgaggaggggcttttggagatcccgccaaagaggtgttctgtgaacccctcccgctgacacacctactgaagggtccactgagacagcaaagcaggaagggtggaaagggtccgccaggggcagtgcctgacatgtgctagaggtgacgtagaatctgggatcagcgacaaaagatcacacctagaaccgtggtcaaggatgtgagccagattttctggggctcagtcctgggtttgtcacttaactgtgtcacttggagcaagtcacatacctctggcagtctcagttgctcatcagaaaaatgggaattttatatatatatataaaaaatataattatatatttatttataatatgtgtatatataattatatgattataataatcacaaatgggattatatataatatataattatacattaatttataatatatatttatttataatatatgtgtgtatatatacgcatatatacatatgtatgtatgtctatatctctatctttcgggttgttttgagaattaaatgacctaacccatgtaaagccctgtgtaccgtgcctggcatgtaggatacttcatcactgtcacctgtttttgttgttatgacctgagcatctccctgttcaccagcccttgttctttagccacaggttgaagatgacagtagatcctaaggaacctcagttctatcccgaaatgcgaaggcctttttactcaaccacaaagaagtggtcagcagaaaactggtcatcccggcctctggggccatgcacagcactcaggaggagctactattttccctgcctgtttacatgcggcctggggccttgtgggctatttgaaaattaggacacgagaagtccaagcagcacctggtaattaaactgagtcctctatcagagagaggcgtgaccttgaagggcatccatacaggagccaggggcaaagcagaaggtgggagggattctccaggcttgaccctctcagcacatctcagtcaggggtgcctggcagcctagattccagccctgcccagtgccacccagagacctgagggaggtggacagctgctcagctgggtgatgggagcctctagaaatagttgtcaacctcatcaaaccagagatgagcccttaggacagccagggtgttgatttccagccaggcagggcattggttctccagtgggatgtggacaaggttcactgcagcctctcagcagatgaactaggggagagacactaccccaaccatgctcccccgacccttcggtgttaagtgaaagtatcttccttttttctctctgctctctccgctttacaacaaaatattatctttagtctgcaaaaccagggccaggaagaatcttcacagctagacagggccatggaaagatgatgaggcatatcaggaactatgtaatcttgtaatacttctgctgcaaaacctcctgacgttctgaatgaacagtcacatgcagcctcttcagtgcaaaactgagctcataagaaagtaaagcaaatctgtaggggccaaatgaagagtgaactggaagtcagagcttcaagtacatgactgatgtggtgtatcccttggggatgggggtgtacacgctggttttgggaagcagggcacttgggtttgaaagttcatccaggacatttgtgtgactctcagtttttgaatattggtgaatagtgctgcttagaacattctggtatgtgagtttttgttgcacataaggtatttatgttgaacaaatatttaagagaaaaattattgaatttaggtatgtataacctcagatttggagaatactgctaaacagtttttcaaagttgctgttcattttaaataacagcatatgggccaggcactattgctcatgcctgtaatcccaacactttgggaagccaaggcaggaggattgcttgaggccagaagtttgagaccagcctgggcaatatagtgagaccccatcgctacaaaaaattaaaatattagctgggcatggtggcgtgcacctgtagttccagctactcaggaagctgtgataggaggatcacttgagtccaggaaatggaggctgcagtgagctttgatcgcgccaatgcactccagcctaggcaacaaagtgagaccatgtatcaaaaaaaaaaaaaaaaaaaaaagtccaacagcaatgacaacagtgtaggagcattctaattgctccacatcctcaatttgtattgtcttttcctcaggcttattttaatcactctggttggatttgcatttctttctttcttttttttttttcttgagatggagtctcactctgtcaccaggttggagtgcagtggcatgatctcagctcactgcaacctccgcctcccaggttcaagcagttctcttgcctcagcctgctgagtagctgggactacaggtgtgtgctaccatgcccagctaatttttgtatttttagtagagatggggtttcaccatgttggccaggatggtctcgatctcttgattgagattgtgatctgcccacctcggcctcccaaagtgctgggattacaggtgtgagccactgtgcctgaccttggatttgcatttctaggatgatgaatgagagtgtactttctcatatgtattgtggcaatttgatacctgcttttatgaagtgtttgttcaagtattttgctcattttttctattgggtcatctgtatttttcttactgatttacagtttatacttgatttatagatttgtttgaaatataaatcctggtgaccataaatatattgcaaatatcttctcccattctttagcttgccttttcactctttttttttcttcctttattgagacggcgtctcactctgttgcccaggctggagtgcaatggcgagatctcggctcactgcaaccactgcctcttgggttcaagcgattctcctgcttcagcctcctgagtagctgggattacaggcgcccgccaccatgcctggctaattttttgtatttttagtagacacggggtttcaccatgttggccagactggtctaaactcctgacctcagatgatccactcacctcggcctcccaaagttctgggattacaggcatgagccaccacgcccggcctcgttctcttaatggtgtttttgataagcagatgtccttgattttattaaagttcaagtctcttattttttccttatagttattactttgtgagacctacttaagaaatattgcttagtccaaaataatatattttcctgtgatttcttttagaagctttatttttatatttttcaaatttagagctacaatccaatccatcttgaattctttttttgtatatatagttttaaaaaaatatatagaggttggtattaatttttttacatctagatagccaactgacccaacactatttattgaaaataatattatttctcttgtgttacattgtcaccattgctgtaaatcaagagaccgtatatctataggtcagtttctggatcctggattctgttccaatggtctatttgtttatccttgtgacattatcttactgtataccattacttcattctataatgagtcttgatatcaaatagggaaagtcttccaactttgtttttctttaagattgtcttggttctttttgccccttaacattttcatataaaatttagaatgagcttgtcaatttccatgcacgctcacaataaacccgctgggatttttattagaattacacagaaactctagatatgccagattgtagagagtttatatctttataatattgaatcttccaatattgaatggtagagctcttacacaacttccattatgttaatacctaggtttgtgattttttggatgctactatttattagtctgttcaggctgccataacaaaataacatagactgggtagcttaaaaaacagaaattgatttctcacaattctggtggttgggaagttcaaaatgaaggtaccagccaatttggttcctagtgagcatttttcctggtgtaggagatggttattcttctaggtgggcaccatcttgctatgtgttcacatgatctcttctttgtgggtgtgtcgcaagagatagcaagtgagcaagctccctggtgtctcttcttataagggcactaattccatcatgaaaggcccaccttcatggcctcatgtaaccttaattacttccccaaagccccattttcaaatacaatatattgggggttagggcttcaacatgtgaattttggagggacataaacattcagtacgtaacatactataaattcttcatgtaggttcaaggttcaaatgtatattacccatttggtctgggaattcttaagataaaagattaatatagaagtggtatcaagcagtgatggtatccctgcaatgtctgtcagaagcaataaaaaatcttctctggaggaacattccctcaattcaggcagttgaagattgctacaaacagagtcctactaaatataagttcacaatccaattacaaaacatacgaggaatcaatttaccatgagcaagagtcagccgaccaagcaactgatggattatgtttcaagaacttaagataatagaactatcaaatatactataaaataaatatatttaaaattattaaagacttaaaaaggaattgaaaattgataaagagaataagactattaaaaggaggaggcagatttgaaaaagaataatattaataaaaatgaaaagtatatagtcattaaaattaaaaactcaatggacagattagagacagctgaaggggaattagggacttggaaggtacaggaaatttcacagaaagcagtttagagagattaagagatggaaaatatgaaagagagattaagagacaagtaggacagaatgagaaattctaatatacatgtaatggggtttccagaaggtaagaagatagataatggggtcgggcatggtggctcatgcctgtaatcccagcactttgggaggccaaggtgggtggatcacttgaggtcaagtgttcaagaccagtgtgggcaacatggtgaaaccccatctctacttaaaaaatatacaaaattagccagttgtggtggtgggagcctataatcccagctactcaggaggctgaggcaggagaatcacttgaacccaggagatggaggttgcagtgagttaagattgtgccattgcacttcagcctgggtgacagacgagattctgtctcaaaaaaaaaaaaaaaaaaaaaggtaatggggaagaggcagcagtcaaagtgaaactggctaaaaattttttagaattggtttaagacttaaatcctaaaaatcaatcagtctgattactcttgagcagaattaaaaaaatatatatgtatagtttagaggataaaggaggaatcagtaaaactcaaacaatccaagagacagagaaaagaaacaaagaaaagacagagtaagtaggaagtataaaataaagcaatggtaataaaactaaatatatgagtaatcataatgcatataaatagaataaattattcagttaaaagacagaagctaggtgtggtggctcatggcttgaagtctcagctacttgggaggatggtgtgggaggactgcttgagtctaggagtttgagaccagcctgggcaccacagttagaccctgtctaaaaaaaaaaaaaaagagattgttagaataggttaaacacacacacacacacacacacacacacacacacacacacgcacatgcagtctagtattctagtatgcctcttgtttagagagtgacgcagaaaggtagaaaatacacaccaggggaatactaatcaaaagaaaactagttcggctatagtaataacagacaaaatggactttttaatacatgtataaaaacactttaaagagaaaaatagtcactacatatgataaaaggaacagttcattaagatacattcacctccattgacctagcaagatcaccttaaaacatatgtagcaaaattttacaaaattaggaggaaaaatagacaaatccatacttgtagtgagagattttaacatacctctcatagtaattgataaaccaagaagacagagaattagtatgattatggaacatataaacaatataagaagcttgaacaataattatatgtgtaattttacactcaacaatcagagaataggccgggtgcagtggctcatgcttgtaatcccagcactttgggaggctgaggtgggtggatcatttgaggtcaggagttccagaccagcctggccaacatggcaaaactccgggtctactaaaaatacaaaaattagctgggcatggtggcgggcacctgtaatctcagctactcaggaggctgaggcatgagaatcgcttgaacccgggaggtggaggttgtagtgagccgagatcatgtcactgtactccagcctgggcaacagagcgagacttcgtctcaaacaacaaccaccccgccccccactgaaaaaagttagagaatatacattctttctaagcagatacagaaaatatacagattttgaccatgtactggatatttatatcatgaagctatttatgtaaagcttaaaaacccataaaactatactataccatattcatggatcttcataaaaaacataaaatacatgggggcaatagatcctacattcaggctgtaggtttttctgcagttggaaggaggaaaaggggatgggggagggacatattaggggcctcagcggtatatgtagtgcttaaaacaaccttaaataagagatcagcttcctgtcctgatccagaaggagtctaacctctaagcctctctctctcccactgattataactaaaacttttaaaagcagaaaatacttaagacttggaaaagtcatagcatgcagactgaggaagggagtcaaaacttgaagaatgaattgttcagagctgaatttctcattttcccccattctatttcccaactttgatctgagggcagcctagttgtggacctaaaatcctgagaaaaaccctgtatttctggccagaggactgagaaaatggatccctgggaactagataatagggcagcagtccccaacctttttggcactggggaccagtttcatggaagaaaatttgtccatggacctgggtagggggatggtttcaggatgattcaagtgcgttacatttattgtgcccttttatttctattgttattacattgtaacatataatgaagtaattatgcaactcaccataaggtagaatcagtgggagtgctgagctcgttttcctgcaactagacggtcccatctgggggtgatgggagacagtgacagatcatcaggcatttgattatcataaagagcatgcaacctagatcccttgcatgcacagttcacaacagagtttgtgctcctataagaatctgatggctctgctgatttgacaggggatcaggcagtaatgggagagatggggactggctgtaaatacagataaagcttcactcgcttgcttacagctcaccttctgttgtgtagacctgtaatggtccatggcccagggactgggggctcctggagtaggggaaatgctggagaagagggattccttagttctgtgtatggaccaacacaaatcttgagctcagcctcaagttgtatatacccaggacagacctaaaagtactactgcaaagattttcacaactgacctgacactagaaccctgcaaacagaaggcaagacagaacctgtgatctgaacacaacagggttaatggcctgctaaacaaatcgaaaccaacattctctagaagttttacaaggagaatctagaatttcatggaataatattagaaatgtacaagatacaatccaaacttacttgacacataaagaaccaggaaaatgtgattattttttaaaggaaaaggcaatcgattatgttaatcctgagatggcccagatgctgaagttatcagacaaatactttacttgttataaccaagcccatgaggtaaaggtaaacaccttaaaatggaaagaaaaaagtgtttggcaaagaaatagaaactattataaaagaatacaatacaacttttgaaaatgaaaattgtaatatctgaaaaacaaaactcattgaatgggcttaatagcagaatggagatggcagaggagtcagtgaacttgaagatgtatctataaaaattatctggtctcaaggacagagagaaaaaatgattgaaaaaaattaatagaatctcagtggcctgtggtacaagaccaaaaggtctgacattcttgttcttgtagcaccaaaaggaaagagaaaagagactggattatgaaaaaaatatatatttgaagaattaatagctgaaaatgtcttacatttcggaaaaacatacatttgtagatttaagaagctcagcaagtctcaaacagaataaaccaaaaggaaatcatgtccagatgcatcacacactgttgaaaaccagatataattgaaaaatcttgaaagcagccagaaataagtaacacattatatataggggaacaaggattcatatgactgagtatttctcaccagaaaccatggaggctagaagacagtagaataacatttttaaagtgcttaaagaaaggagcttttaacccagaattctatattcagaaaaaatatccttcaggaatgatggtaaaataaatacattctcagattaagaaaaagtgagagaattctttggtattaaacctgctctaaaataaatgctaaagagagtcttacaggctgaaggtaaatgataccagagggaaacttgaaacttcaggaatgaaggaagagcaacagaaatggtaaatattgagctaaataaaataccctatttttatccttttaaattctttaaatatttatggctgttgaaggcaaaaatcataacattggtgaggttctcaatgtatatagatataaacatatgacaggtataacataaagggggagggtaaaagtatgtatatgtttgtcaggctcctacattttactttgaattggtaaaatagtaacttgaagtagactgtaaaacactaggaatgcatattgcaatatctagaacagtcactatacacacacacacacacacaaagagatattgccaaaaaaggcaacagatacattaaaatgaaatactaaaaactttaagtaattcaaaagaaggcaggaacaatggaacagaaccaaaacacacagaggacaaacagaaaccacataatacaataatagacataaattcaaccataccaataattacattaaatgtaaatgagctaaacataccactaaaaaaacagagattgtcagattggataaaaaagaagactcaaatataagctgtctacaaaaagctaatttaaatatgacataggttaaaaaaggaaacaatataaagcaaatatgatgaaatgatagaaccaagtggtagatacctgtgagttaattctgttacttgctattatattctatatgtttgaaatatttataataataataaaaggtgattggatgattttttacataaatattctagtcctctagggaggaaaaaggaaagattggttaatagatacaagttacagtaagatgggagggataagttctagtgttctacggcattttagggtgaatatggttaacaataattaaatgtacatgttcaaaaagctggaagagaggtttttttttttttgagatagagtcttaccctgtcacccaggctggagtgaagtggagtgatctcagcttactgcaacctctgcctcctgagtttaagcaattcttgtgcctcagcctcttgtgcctctgcagctctgtagcgattctttttttttttattttttgagacagagtcttgctctgttgcccaggctggagtgcagtggcatgatcttggctcactgcaatctccacctcctgggttcaagagattcccgtgtctcagcctcctgagtagctgagactgcaggcttgcaccaccatgcctggctaattttttgtatttcaatagagacaggtttcaccatgttggccaggatggtcttgatctcctgaccttgtgagctcctgacctcgtgatctcccacctcggcctcccaaagtgctgggattataggcatgagccactgtgctcagcctaaaagagaggattttgattgtctgcaacacaaaaaaatgataaatgtttgaggtgatggatatgctaattaccctgattggatcattatacattgtacacatgtatcaaaatatcactctgtgtcccataaatatgtacaattattgcatatcaactaaaaataaaaagaatcaatgccctttagatgggtatatgagatctttagatgcctggctccagactgatgtctcatctttttccttctagtccctggtgtggggccagagcttaggatctggaatcagacttcttaaacccaaattctacttcttacctggtaatcacgtccaaaggactttaactttcttaaacctcagaagacttcaacagtaaaataattataacattgcctaactctaagggtttattttgaggaataaatgtaatattgtacctaagtaatggcaaaatgcttggcacataggacttgtttaacgaacatgagctgttattagctagactgattcacctggctggagtcactgattccactgtaggtcatcctagttccctgccttttactaccaacgaaacacagattgcaacacattaatggctggtgaaatcaatagtttattgtgaccagcattaaaaaaaaaaattgtaggctgggcacggtggctcacgcttgtaatcccagcactttgggaggccaaagcaggcggatcatgaggtcaggagatcgagaccatcctggctaacacggtgaaaccccgtctctactaaaaatataaaacattagctgggcatggtggtggaagcctgtagtcccagctactcgggaggctgaggcaggagaatggcgtgaacccaggaggtggagcttgcagtgagctgagatcgcaccactgcactccagcctgggcgacagagggagactccgtctcaaaaaaaaaaaaaaaagaaaaaaaaaaagtgtaatgaaatgatgtacaacagaatagaatgggttggaatttaatagaactgaaaagaacagaataggatagcatttttaaaaagtgaattgtgtatagttaggataatgattgtttcagtgtgtgggtataaaacatatttattattgtgggttttggccaaaagaagcttgagaaacacgggtttccatgattccttttgcctggagtactgaagcttagtgccgccctccaatggattttcaacagcctgttggagccccacttccttgaaaagttttcacatgattttctttagccagagtgcaaaacctgtggaagccatgggtacgttttaaacaagggagtgatgagatgtgatttacattctaagaacaggcgctcctgtgaagaggaagcctcaggagggagtgagagcagaagggagcccacctgtggttgtctcagcaacagcagaagaacctgggccgctgggagtggagttggagagaaacaggttgatttggaagttcttctgcaggtagaacggaaaggcgaattctgcaagatgctctggggtccactgagctcagctgctgaggctcagctctttctgtggcttcttcttgagcagcctgttgaccaagatgtggcccatgccactccctatattcggagtccattttctgatgccctctctcagctcttcgcctgcactcatctgtgactgcctggtactgctaggaagcctctgtttgtgtctcatctctccaggtggactggagctcctgggggtcctttcctttgtgggggttctcaatatcagaatggagtcgcttatgtcaaaccctaacaaaatggaggtggaggtcacgaattggagcctatatgcgtgcctgtaacaggacttgtcacaaggaatccctgcacatatgtgtatgatggggactatgccaggaactcctcacatatggaggattcgaggtaagccatttgctcaaggacacttacccagcaatggcagcctccactaatgagacatcgcgaactcctgtaatcaatggtctttgtttctaaacagcttatgtggaattctccgtttttttgtctgtaaaagttttctttagccccagtctctttggatatgcctatgattcatcatagcacatgtttcccaggttgcaatcccctgcaattcccaaataagctccttttgtggagatcctgtctctctctgtcattatttaggttgacaccttttatgtcctgcattgctgttgatgacacccacatttgtacctcctgcttgaatgtcccctcccccaactccaaaattcctctctctgtctaccctgtacctctatttgaaccactaagaggcatctcagacttaaagtgtcccaaactgagcccctgtgatgcccccagagctgctcctccccaccacctcctcctcagcaatggcagcttgattcttctttgggctttattcagtcccccaactttggagctttcttgacccctctctattgctcacatgccatattcaatgtgtaggcaaatcctttggccctgccttccaaagacatgcagaatctactcacttctcgccacctcgctgtctcactctgcgtcaggccaccctgtgtgtccttgcacaattgcgggagccttggctcgagtcctccagaccttctacctctttgacttcatctagtgctgctccaagccccgtgctcttccttggacacaccaggcatgctgccagcagagcctttgcatgtgctgttccctttgtcgggaagccttttccccagctatctgctcagctcatccgctgtctctttcgtcctcgctcagattccccttctctgtgaagcctttctgaccatcctcattaaaatcaaataaccccacccctccactctcttgcccattttcctcatccatttccccctaggactaatcactctctaacattctctatatatttttctgatatatttgtttatatgtcttgcataaacaaaatgatttggtttatggtctatctcttcttgctagaatgtgagctctacaagggtagggatgcttattttgtcaccgttgtgtccctgactcctaaaatgctgacggtgtggccagctgcatgccctgctgtctctattttgaaactctaacaaaattttggacaagaccctcctctttcattttatgctggacctggaaaattacagagcaggttctgacttccaggcacatggtacgcattcaataaataatctcttgaatgaatgttgaatgtagtggttttcaaagcagatgggagataagaggttactgagtggttgactgaatggagggagggctgatcattcattcattcacgcattcattcattcactaacattcaacaaatatttacctgacatccttagggattaaatttctgtccactgatagtgaacctcatgcatcatgttgcacagtccatagatgtgagggattttacgaacacaacaccctgtgatgtaggtatgattgtctccacttccagatgaggatactgagaagttaaggcattgcctgaggtcatgtggctagtggaagccacaggcaggattatcccatggctggccaggctgagctgtaggggcagctcctgtactctcagcctcctccttcagaatccctcctcctcactccccattcgtgggctgcttctcccaggatcaggcagcctctgcccaccttttctcacttcaccctttctccttgcagaattagaaagaatcggctccagctatttgtttcttactgtggatttatccatgtgtcacctctcccaggcagaattacattctgaaggcatctctaattgagattgctccatggggaaggactcttagggctcagaaagcaggtggtaaagccctggagtgaggcaggaaccccaaagccctatgacaccccatataggtacccccaaacctgcctatacttcaggccaggcccccagtatagagatggaaaaatagtcccacttttggtcacagattctggaaaactgtgagattctggggaaatccattttgagtaataccttttagaagaagaaaaaaatggaagtagcttatcatagaatgggttttgttagacaaagatggcaattcaggaggaaacataaatttaacaactctcaagtatgcacagctgacatctcgtagagcggggctggtgactaagccagaagttactgtctgcatcctttgtaacttacaaataaaaatgaggaccagacattagttatgaaatgcatgaacaaccactgctctgggagccacataaaaagatggtgattccaaacatttaaccttagcatttgtctgtgtggtttcatttgaaaatgatggggtgcttgaaactctcagaacttagaaaactcttaagtttttttttttttcttaagacagggtcttactctgttgcccaggctggagtgcagtggtgcaatcatagctcactgcagccttgaactcctggcctcaagggatcctcttgaatacctgggattacaggtgcatgccatcgtggccaatttttaaatttttttgtagagacaagggccttactatgttgcccaagctggtcttgaactcctggcctcaagagatactcccaccctagcctcccaaagtgctgggattacaggtgggagccaccatgcctggtcaaaactctatgcattgaaataacaaatataagaaatagataaaaatataatacataatgaatataataaatataataaatatacaaatatataaatattgtattctatatgtaaactcatgtattttatatatgaatatattatatgcgtaacataatatattgtgtgtgtattatgtgcataacataatatattgtgtgtgtattatgtgcgtaacataatatattgtgtgtattatgtgcgtaacataatatattgtgtgtgtattatgtgcgtagcataattattgtgtgtgtattatgtgcgtagcataatatattgtgtgtattatgtgcgtaacataatatattgtgtgtgtattatgtgcgtaacatattgtgtgtgtattatgtgcgtaacataatatattgtgtgtattatgtgcgtaacataatatattgtgtgtgtattatgtgcgtaacataatatattgtgtgtgtattatgtgcgtaacataatatgttgtgtgtattatgtgcgtaacataatatattgtgtgtatgtgtgtaacataatatattgtgtgtatattatgtgtgtaacaatatgttgtctgtatattatgtgtgtaacataatatattgtgtgtctattatgtgtgtaacataatatattgtgtgtctattatgtgtgtaacataatatattgtgtgtctattatgtgtgtaacataatatattgtgtgtctattatgtgtgtaacataatatattgtgtgtctattatgtgtgtaacatatattgtgtgtctattatgtgtgtaacataatatattgtatatacatttgaaaatattgtatatataaagtatataacataaaaatcagaaataaacataaggaatgtaagtattgaaattacattgtgagcttgctttttgtactcagaccttccccacagtgttaggatggtttcattggcaaataaaagaaactgaacccaacccagcttaggacttcaggaaaattgattgaatgattgcttgattgcttctatgattgaaaacgctgcctcacctccaggcctccctggcttgatgcccagaggggcaaaaggagcttctcttttctcccagcagtcacatgtcaaatcctagatgagctcaggctggccttacttggacacacgcccctcccttgggcctttgacttagcaggaaggatggggggctaattagccagaacttgagggggccagacactgtgactgaacccccagaatcaataccatcagctttggggagaagcagctcccaggaaaaagaaacagtaattgcctataatcttgcttttctttccatgctgacaagagacattttccctgagactgacagaaagcgctgtgttataaagaactagtcctttctcttagctgttttcataattccaggtgttttctgttccagtcaaaagactcgagaaaagaaaaatttcccaagagagaggatcaacttcttctttattttgggaacagtagctaaaatgtggtctctggacccaggctaacctagatttcaacactgcatctcctgtggagtgtaggaacttgggaatttaggtccagttggccttcactttccctgtttgcaaaacagagataaaattatacccctcttagttttatggtaaggattagataaaataacacgtattaccaaatagcacagttcttggtagattttcttttatttactttctccttcaaatacccactgggtaattttttacccctcgagaagccttggaaaagcagtgatactggatgcattcccttatcttatcacttgtcacattcattatgctgaaatcattcatttaagtgtgactctctcttttattttccatcaggcggcaggttccttgagatccagggccatgtgttatccgttttgatgtccccagtgtcagacttaatgcctgggaacacaataggaattcaaccaatgtggagctgctgaactattgaaccaccagatagagcttttgagggtgaccgatcgttattgcctttagaaaagcaagattggtgggttacacccacacagagccaagttagactattttctggaatttgtttaacccagggtatgtatttacctggaccacaaagagaatgttgatgtgaccaagtcatcttataggggaatggcaaggaagggaagaggcaacagggagttacatggctgggttggaatcttaactctcccgcctacttgcttgtggaatctgaagcaagttttttcatctatttctacctcagttttctgatttttaaaatggtacaataataccaactacatgggactattgggataattaaatgagacaatgtatttaaaaagccactgcaggccgggcgtggtggctcatgcctgtaatcccagcactttgggaagccgagcagttggatcacttgaactcaggagttcgagaccagcctgggcaacatgatgaaaccccatctctacaaaaatacaaaaaaattagccgggcatggttggcatttgcctgtagtcccagctactcgggagactgaggtgggagaatcgcttgaacctgggaagcagaggttgcagtgagccaagattgcatcactgaactccagcctgagaccctgtttcaaaaaaaaaaaaaaaaaaaaaaaaaaaaaaaaaaaaaaagccactgccttgaggcatcaacatacaatatggaagagtccctgagctggggccacagggtttgcttggtaggcactgtgtttgtaggagtacagtcttaactgctgtaacaaaggggctccaaagtacagtgacttaccaagagagaagttgatctgtttccatgtcacagtctggaggtcagcaggtcagggctgctggggtagctccacatccttaatacgtgctttccatttctgtgtctaaggagataccctggttcttctcctctccttccagcagtggaaagggggaaagggactgggcacaaggggtcgatgatactaccaattttttgagggcaagatcaggatgtgaccctcatcacttctgctggctttacctcgtcacatgaccatggctactgcaagggagactgggaaatgtagtctttggccaggcagccatgttgccagctaaaatttatactacagaagtatagaaaaacaaaaattgggagacaaccagccacctgccatagccacttaggacctcacgaaaaaaggcaagagtgatagttacctctcaaaagggctctttgctgggttcccttggcagcaagtgcatagtacaaagtctaactccccatgaaccagaagggaattcaggaaatgattcaggctccctggctgactcaaacactcaggatcctggagagaaaagtagccatacacccatttggggcttggggtttagtttataataataataatgactttggcacagaaaacttcctgagggttaatgaatgactggcttggattaatagcccaaatcactgctgaaatctatcaactccttccagcttcatattaatctacaggaaattctttgtataccgagctattacagcttcaatctcacaaaataaaaatgaatggatgtttcattagaacttggaaaaaaacttgatcaccattgtgggtggccaccatgctgttattattttttttccaggcacatttcctgcatttcctccggttctctttctggcttcaatttgctgcagtggcaacagcagcagctggccctctagactaacatctccttgctatttataatacactttgcaatgctcattatttcttaactttgtcttcccagatagactgggagctccatgaggtccgagacaacctgaagacgcccagctcagcagagactggctacggcaatcactcagtaactatttgttgaattggacataatagaagagctgaagaattttaaacaagtcaccatcagtgcagtggattcctcaaagcaaacctggaaatctcggcatgagttggatttaaggcagtacattttcagctcctgaaaatttgaacagtttctcaagagaacaacttgaaacagaaaggcaaggatgtagatgtggttgtagaagatgatgtctgcggccaccaaactgtccactgtgaagacaaaccatgcatgtttagtaggcagtggctcctcttccctgtggggagtcccactgcttccctggcctgggtgttctctgccggtagatgttattgacaaaataagcaaagtcctctgattctgagaattagagttaatgatagctctagattgcctctgccatgctatttaaagtcctgctttattgtctgacatgagttcggcatctatgaggacttgtccagtgcaaagtacaatctccactgaaagatatcaccagcacatcttgtcactgtgctgtagcaagctgggcagtacaatgatgttggcaggatcctgtttaggtggaggatggccacctgggcatcaagaatcttctaccctgattccacattgactccccaaagtgggcttcagacagctctttacttacgtcttctgattaaagcagcagacagggtcccagctagagaaaagttctgggagcaggagaggtgttggtggctttaaaaccaggggtgaagattgaattaggaggttaggcaggagtaggatcaaagacttagaaaatgcttgtttcctcctattattcttatgagagctgatacggggctttcagttttgggggagagccttggaagagaatgagggaatttaatcaactagcgggacctttccaacttacatttcccagtgtttgttggatgatacgtttgcctaataagttaaagcttccaaaaatagaaaggaaagcttggtgacactaagctctggcatgctgtcatcttctggctaggggtcttgtgcttctgtttttctatttctgaccaaagacataaaatgtgttgtgacctctcaggtaatgctgtggtatcatgtccaagcagtaactaaccagagtggagtttttacaggtaaaaaagtattgaatagctcagcaacagggaggacttaatgataaattgctttttcagaaaatgacaaggggacagacacttgcggttcttccattgagagccttaaggaagttaagcgaagcctctgctcaccccttcaagtaacgatgacccatcagatcgtggtcataaccagtagcatctgaggcacccctaagctctctgggccccagattccttgttaagttaaatgaggtgacttcccagtttaccattctaggggttcctgaggagttaaaaatgaaggagaaaatgcaacatgtaccaagtgagcaagagctcaaggcttatctctggcacgaaagtgaccgctgtccgttagagatgtgattgccctagatttcctttaggaaatgcaaacattgaactctggccttcaggacccaagtcccggcttgcatctattctatacactttctgttatttgttagggctcacaaggaacagttatttatcttttattttctattttttttttagagatggagtctcactctgtctcccaggctggagtgcagtggtgccatctcagctcactgcaacctccacctcccgggttcaagcaattctcctgtctcagcctcctgagtagctgggactacaggcgtgtgccatcatgcccggctaatttttagtatttttagtagaggcagggtttcaccatattggccaggctggtcttgaactcctgatctcaagtgatctaccctccttggcctcccaaactgctggaattacagatgtgagcgaccacacctggcccatttgttttctttcaaacccttctgtaagaccagtgctttaggtgaacacgtggacagaacaagatcatcactattttgcaatatgaagaccaactgcgctgtgaccagaaaaacagaggcaaaatgttgagcttaatgatacctttttataatttgtatttggtgtttctcaattttccattggatagtttgagagataagtacaagtcaatgacatgttctctttcgtaccctattgtctaatcctgctaacacacacacacacacacacacacacactgattacctaatttatctgttccccgattattacactctcaattgctgcagagtctcagaagcagcatggtgtaacagaaagaatatgaggcttagaatccaaaagccagagtgtgaattccagctccactgacttgctgcgtgacttgaagcaagtcattacgtgtctctgtttactcattttatgactttcctattgcctctgtaatatagcaccacaaacgtgtggacttaaaacaacatgcatttattctcttagcgttctggaggtcaggagtctgacatcaatttcgttgggctaaaatcaagatgttggtaggaccaagatccccgtggaggctctgggagaacccatttccttgcctttgccagcttctaatgctgcattccttgcattccttgattgttgacctcttcccccatcttcaaagccagcagaacagcaccttgtttcattgccttctttactgtcaaatctccctctgccttcttcttataagaacacttgtggttgcatttagaagctgtgataatccagaataatatctttatctcaagatctttgacttggtctcttctgcaaagtctcttttgccacagagggaaatattcacaggtcccaggggtcaggctgtgtacgtctttgggggactttattctgcctaccacactcatcttttttttttttttttttggatggagtcttgctctgtcacccaggctggagtgcagtggcatgatctcggctcactgcaacttctgcctccccagttcaagcaattctcctgcctcaacctcccaagtagctggaattacaggcgcctgccaccacgcccggctactttttgtacttttagtagagatggggtttcactatgttggcctggctggtcttgaactcctgacctcaggtgattcccccaccttggcctcccaaagtgctgagattacagacgtgagccaccatgcccggccccacactcatctattaagtagagctaggaattcctatcctaagggacacaaaaatgaaaaaagataaaatttgtgaagaggcacataatgaaagcccatacatgtcactgagttcagaggagggtgggtctgacctcccattggctggtctctgcctgatggacatcgtgaagaagagagccaggactagtgtggctgggggatgttcaggggccagagtggcttcaggtgccagcagccctggccgaaggatgactccaggagcaaggctcagagccgagtggaagaagcttcataaacgcaactgagccaagcatgatgggatgtgcctgtggttccagctactcaggaggcaggtgggaggatggcttgagtcagaagttcgaggctgcagtgagctatgatcacactactgtactccagcctgggtgacagaatgacaccctgtctctaaaaagaaaaggcacctggatgctcatgaccgagatggggtggggtgggtggggtgggacagccgcactttataactttgctttcagcatgatgtggattagtgtctcccatgtgggaaaattatgtttaccacttagagacctgatagtgcttgcttaccccataacgctggacggtggcaggcttaactcccccatcaagggccttaatgtatttggggccctagtcctagcaacagcagcaaatctcctttttcttttcctcgagctggttgttcaccaggcagttgggatgttaatgggaagagaagacacacacaagtcccttgttttcaataaggcagtctggtcacgtccttagcaggttattaatctttttcaaacccctcctctccaccaagttttatgatcctgggaaggagattcctacctagcatccttagagttatcgggggttaggatcggtgcatgcagtcacttccgtggaatcatcagtagccctccagcctctggggagagctgccagtggtcagagatgttgggaattacgagggaggagctagggagaaggaactcacagtccctcagtctctgaaggtggctcctggcaggagagggggccagtcctagataagagctctcccagggaattccaagggtcctcccaaggtccagccacaagatgaggaattactgttgggctcttcctcagatgtgcctgtgaattcatatcacagatgcttgatgcatttgacaattgtttaattgcttgagcccaactgatactctttcagtcactttaagggagtgatttcaagtatgatcattgcctcaaatctgtatggctttccttgcctttcaggtgctttaagagggcttatgttctttgactcccctagtaactcaaaagggtggctaagatgcaactctggaggtttccaagctctctgcaaagcctgccttcagtagtctgtgcaccacaagaagcataactttattatcctctagctgaatttacctcctgcttcgagcccctgttttcccatgtcattttaggggtccaatgtttttcctggaggcatatacacacacacacacacacacacacacacacacacacacacacacacacacacatatatacacacacacattccaggggcctctgaggtgccaagacatgtgtggggtccatctggttcacactgatgtccatgatcattgagttcattttttatatcaactatgtgacacttcctatagtttccagttcctggttagaatttgcaaagttgccgactatttctttgaatagagtagctagatcatgggtctacaccagtcatcaagcagcgatttccctgttggaagctccaagcaaattgtcagctccagcattccacacagctgtgggtgccacactccttttccttttaaaagatgatgatctgctagtggtgaatgctcttggagttttatttgtaggtttttcttgttgtcgcaaatgtctatatttcatcttccctcttgagggatattttccatgggtagaggatctaggcttttcttttggattccattgtggctttaaaaaaaagtcagttgactgtttatttatggcttctctaaaggtgatctctttcttcctaaggctgctttaaaagtttccgttccctccctcccttcctcccaccccatcccccttcttcctttccttcctccctcccttcctcccttctcttcctccctttctcccttgtcttcctccttttctcccatcctcccttcctccctctttccttcttttttcccttcctcccgccctccttccttcttccatcattatatattaaaatattttctttctttcttttttttttttgagatggagtttcgctcttgttgcccaggctggagtgcaacggtgtgatcttggcttactgcaacctccacctccctggttcaagcgattcacctgcctcagcctccctagtagctgggattacaggtgcccgccaccacacccagctaatttttgtaattgtagtagagatggggtttcaccatgtgggccaggctggtcttgaactcctgaactcaggtaatccacccgccttgtcctcccaaagtgctggaattacaggcatgagccaccactcccagcctattaaaatattttcttctgggccttccctccttttacttcttttgataccgccatcaaatgcatgttaggttgactcactgtgtactctattaccctctcatctggtttttaatctttctgtctccttatactgtaatctcagtgtttcttctgctttaattttggtatatgaattattcagctgtgttcaaagtgtggttaaagcgacttatatgctctttaatttttagttattgtacttttcacctctagaagttcttctgtgacacttcttatagtttccagttcctggttagaatttgcaaacttgttgactatttctttgaaaagagtagctagaattgttttagtctgtgtatagtgagttgaatatctgaaacctctgtgagtctgtttcttttgtctgctagccctactcatggcgtcatgttttcctggatgtttagttggttgtctttgaatatgtccaactccagttatttctgggaatacccaaaggcacacctgttcactatcacccagtgaactgccatgtgtttgtctcctgtcatggtaacatttgcattcagggagaggcctctgctctctgcagaacagtgtgaaatcacctcatttttgccttcaatgaaggttgtctcttgctggtcaccaccacttcctcaaatgactaatgccactcttgctcacagtgctaaggcgctaaggagttttcagagggctagagtgattctgcatcctctggggttctcaggaaacgaggccacagggccatctgtgcatgagtgacagtggggtggggtggatgagcagtggcagtggtgggcacctatgctgctggcgccacagctttttatatcttggtgaaaacaacgccttgcgttttcacttgtagattctccggctacattccacaagaacaaattctggtcacagaggccagagtagactatcagtgtaatggcccttcccctttgatgatagcagcttttttcgggggagcaggggtggccaaacttcctagccttattttatcttcctttctagttctccccagaggctgctgggtccacctctccctctgccagacagacaggctcagacatgcaagaacggaagggggtgtgggggttggtgggaggattaagttggggaaagccagtcttgtctttgtagattaccagaactgacacacgtacacacacgtacactcactcactcactcactcatctattcatctatttttggcctaagtgcctttggacacttcttcggaaaagcacatgaactcttcggagtctcctgttccacttggtaaatttcctatagccacgcactgaaagtccctgctgccctccttcctctgagcttgtggggcccacagatcccctgctccacttcctgcttcatttcagctgatggtgagtccagggcaggcttgtaggaagggcgggctaggcgtggggaactgcagcacccaccccaccccccgccccagtgcttgttgccccagcctctgtctccctcgctgtgcccttcccttaagccccactcttggcctccccaaagacagagtttgttctgtttttattgataggatgacactccctcgttctaataccatctgaatgcctgagcaattacatcttacaacctcatgaaaaacacagcagcttgtcacgatgaatgatgttaccgtgaataatgcagttttgagttcaaactccttcttattccaagaatgagtaaatatccctattccctcccctccccattgcatttgggtttgacatgacatgaatcattgtggttttactcctgggtagaattgtttttctgtattgcattgccaattgatggaaggacaaaaaaaggaaacttaccaatgagcagtttcagatgaacttaaattctcagaaatcttgaagaatgaatgaactataactttctgaagttgcaaaaatgttcaagtcggaagtgacccatgggaagcaacctggtccttaattaggactggaaagaaaacggaggcccagcgagggaacagtggcttccccaaggtcacactgcaagtgagtggtggcactagtcacccaggagtcctcctgactccatggtatcctgaccccagaccagcagccttatttgtggttaaagaacgtggaaaaacagcttatgtttgaattttaaaatcatgccagtactaaagatctgcattccatgaatattgagctttgctgtgtgcgggttgctacgaattttgtaactattttctctaagagctctcagtattttacatatacaattccattctttattgtccagggaaaaagttgcatttactgagcagtaagagggtgatttgaagtccctggggtcccccacccttgtctttctatgtgagattgtattgcagggctcacatttattctctcagcagctcattgcacagacagtgtatttattgagcacctactgtgtgccaggagctatgtggtaagctaagcagacaaaaactcctgctctcacaagaagaaagaataaacaagcagacaattgcacctataatgtcagcctggtgtgatggctcactcctggaatcctagcactttgggaggtgacgatgggaggattgctttaactcgggagttcaagataagcctgggcaaccaagaccctgtctctacaaaaaaatcaaaaaattagctgggggtgatggcatgagtctctggtccctcgggaccagaggcctcgggaggctgaggcgggtttatcacttgagcctgggaggttgaggctgcagtgagctgtgatcacaccactgcactccagcctgggccacagagcgagaccctgtctctaaataaacaaacaacctaatgtcaagttaggaagtgtggcaaaaaggaacaaagtcagggtgactgccattctagaaagggtggtgagggaaggtctccttgagcagatcctgtgggagtggaagggtaagtcacgagactctctggaggaagaagattccaggtggaaatgccttagtgggtgttaaacgctttaacgggtgttagccagaaagccagaatggctggagctgagggagtagaggaggcggcatagaaaatgaggtcagagatggaggcagggccggatcacagaggggcacagagaacgaggagggaattggatttttggaaaagattgtggcaaaatacaaaatataaaatacaaaaataaaatataaaccataaaatgtactacctttaccattttaagtatgcagttcagtagtgttaaatacatttacatcattgttcaacccgtctccagaactctctgcatcttgcaaaattaaaactctatgccatttcaacagttcgcatttcctcttccctctcgttcatggcaaccgccatttttctttctgtctctgtaaatgttagtacttggggtatctcatctaagtggaatcacacagtgtgtgtccttttgtgacagacttatttcactttgcataatgtccttaatattcatccatgttgtagcatgtgtcagattttccttccttcttaacattgtgtaatattccattgtacgcatagactacatttagcttatctgttcacctgtggatggacacttgggttgctatagtgaataatattgctgtaaatatgggtatacgattatctctttgtgaccctgcttttaattgttttggatatatacccagaaatggaattactgaatcatgtggagattctgtttttgatttatttatttatttttaatttttgagatggagtctcgttctgtcacccaggctggagtgcagtgacacgatctctgctcactgcaacctctgcctccttgcaccattaattctgaaaatgcaggcctggatccaaccgcctttggggacgggtacctgcccacaggaagaggttgaggagacaataatgtcacgagaatcatcatctttgactgggaaatggtgtgcagagtttctggtgccttctgaagtgattgtcgcatctcagcctccctagtagctgggattacaggcatttgccaccaagcccggctaatttttgtatttttagtagagacggggtttcatcatgttggccaggctggtctcaaactcctgacctcaggtgatccacctgcctcagcctcccaaagtgctgggattataggtgtgagccatgcacctggcctgattggttatttaaattctgagatggggtatactaatgtttgaaaaccacagggatgggataggtataggtggggagggagagcaaaagtggtatttagaatatgttacgtttgaaaaacctaatacacattctacatccaagtggacatagatggagttatttgaagctcagaagacacctgagttggagacaggaatttgtggatcatctgatatatttagcatttatagccacagggctgctgcctgactttttttccccctagacagtttcgctcttgttgcccaggcacgaccttgactcactgcaacctctgcctcccgggttcaagcgattctcttgcctcagccccccgagtagctgggattacaggtgtccaccatcacgcccggctaattttagtgcttttaatagagatgggtttcaccatgttggccaggttggtctcaaactcctgacctcaggtgatccacctgccttggcctcccaaagtgctggccaggcatgagccactgcacctggccaccactgcctgtttttgtaccgcttggcaagctaagaatggttttcacatttttgtttcttttttttttggagacggagtctcactctgtcacccaggctggagtgcagtggcacaatctcagctcactacaagctccgcctcccgggttcacgccattctcctgcctcagcctcccgagtagctgggactacagttgcctgccaccacgcccagctaattttttgtatttttagtagagacggggtttcactgtggtctggatctcctgaactcgtgatccgcctgcctcggcctcccaaagtgctgggattacaggcatgagccaccgtgaccggccactgctgcctgtttttgtactgcttggcaagctaagaatggttttcacatatttgaatatttgaaaaaaatttttcaagaataccattttgtggcacacgaaaattatatgaaattcaagtttcaatgtccacaaataaagttttataggaacatagcatgctcactcatttaggtattgttacggctgcttccacactacagcagcagggttcagaggtcatggcagagaccacgtggcccacaaaggtgaatgtacttccctttgtagaagctgtttgccaaactcttggctagcagagtgagtcatgagagaagagagaagtgcatggactgaggtctgtccagggcctgtcaagagccagtaaccgttgctgtgcgtcaaggatgccaagatggtgcctgctccatgagcaacaaagcccaggggcccagcaagccaaggctgcttgcctcttcccctggggccagctgtgcatcttgtggatggctgaagttgagcaacccataacaggctcctgacccactgtgagatggtggcatgtgaaaggaccagcatccaacagtcttgcccttactatattagtaatttcctggggctacaggagctatttactacaaactgagtgacttaaaacaatggaaatggattctctcgcagttctagagggtattattctttcaatcaatcaaggtgacagcagggccatgctcccaaagacagctctaggaaaagctcctggtttctagcggctgcctgcactccttggcattccttggcttacagctgcatcattccagtctctgcttcggtcaccacgtgccttcatccctgggtcgcttccatgtctctatgtccaaatgtcgctcttcttataaggatgttagtcattggatcagggcccaccctaatctggtatgacttcatattaatgtgattgcattgataaagacgctgtttccaaataaagccatcgtcacacgtatggggactaggacttcaacatatctttttgagggacaaaattctactcactatacttccacacacatgcagatttcacgtggttgaatctaagagtatttgggttcttgcgataaaaggatatggcccggtgactaatcctggggaaagaaataaaaagagaaaaaaacctctagtattggtgttaagaccctgagttttacttcatttcctcaccactccctgctgcctgcaggcaggccagctgcctccctaggggcagaattggagaaagaatacgtctctctgatgtaactactgcgctcaggcaacccactgtggagcttcacagtggttctctgccaaagattctgaggtttttagcctgagatgataggtcaaaaccagggaggtgctcatgggggaaagcagcactggacagagtctagatgctgcttccctcaggctgtgatgaccttcaactggccctcatccccaagaacctcagcttcttcctctgtattaaggaaataaccatagccccgtccgtctgtcacaatgtagaagcggggatgagaagtgaaaagtgaggtcttgcaaaggtctcgcaagtcctctgcaaagctaaggggtattactggacagcgacttggatgaggatggccagacattgtcctccttcaggaccagcttctcagagcagagtctccaaacataatgtcgcttccagatgacgcaaatctgatatcagagaatgactaaaagcttgaaactttgcttttaatctgttgtggatcaagtttcttttcaaataaatcaaagtctgtgaacttaggaaggaggaaaattgctggatatcttttttggcggagggatggggggccctctgccaatttaaccatttcaaagtgtccaattccatggttttaagtatactctagttccagaatttgctcatcatcccaaatagaatatctatactcattagcagcctctccctggctcttcacccttctcccgttcctggctaccatgaatctgtgtctgtctgtatagatttgcctattttggatctcttctcttctgttctcttctctttttaaagatggagtgtctcactgtgtcacccaggctggagtgcagtggcgtgatctcggctcactgcaacctccacctcctgggttcaagtgattctcctgcctcagcctcctgaatagcagggattacaggtgcctgccaccatgtgcgactaatttttattttctatttttttttttttttagtagagacagggtttcaccatgttgcccaggctggtctcaaactcctggcctcaagtgatccgcccgcctcagcttcccaaagttttgggattacaggcgtgagccatcactcctggccctattttggctatttcatatagtggagtcatacaacatgtggccttttgtgtctggcttctttctgtcagcataatgctctcgggttcacccacgttgtagcatgtatcagtatttcatttcttcttacggctgaatagtgttcagttgtgtgggtttgccatattttgtttattcatttattgatgaacatttgggttgtttccatcttctggctattatgaattgtgctgctatgaactataatgaacattctgcatacatttttgtttgaacatctgctttcagttctttttggtatatacctaggagtggaattgctgggtcaagcggtaattctgtgcttaacttgatgaaccaccgaactgttttccatggtggctgcacctgcatcattttgcattcccaccagtggtgatgaagcttccaatttctcccagatcatgatttaacactcatttttattaaatgcaacaacccttcctgcatctggcctgagtgtcctgggccagccaactgcttgctctccatctttcctgtttggtcagaggccctgggtgcagccagtgggttacgcactctgatcccctcagtgacttctcctgggaggtcaccaaggatactcattcagtcaggtcttccagagccacagtgttgatcctgcagtgaggacatgagtgtgcagtgactggactctctcaggcagtcgtggaagcagaggattgctctggccagcctggagacagttcccattggttcctggacttgatctgaatcaactccttcttcctcaccatctcttgcctggtgctgctggctgagacgttgcacctgtgggggctgtccactcccagctcacgtcttctggcagctccttactctattctaatgcgcctagtggtactgccgattttctcttttcccagacacctctctccacactccttctcccacattggcctggccctcatggctctttgatcctcatggaacattctattgtctcctaggtgagaagaaaaggcatcccagcttatattcagacacatggccttgaactcgtaataactcacacatgtaagccacaataacttcatttgcatgcaaccaccttgaatgaatggtctcagtaaatgtgtcatttattctcaatattctggagtgctggaaaaaatggggagtcaaaggatccctcagtctgctggtgtgacctggggcacccatccctgttccctctcctcttacatgggataaaaccccagtggagccgtgtctctggatcactgtgatggattaggtgagtctctacctgggcaccctctttcacgtggcagcatttttatcgctgtgacaacctggagtcaccttgccatttaccacagttgccttggatgaccaagtaaccctcttgcccttcatggggggatgtcctttgaagaacaccattcattctggaagtgcaggcctggcctgaaccactttggggacgggtacctgtcacaggaagaggttgaggagactataatgtcaggagaatcatcatctttgactgggagatggtgtgcagagtttctggcgtctgggggcattccatctgtgaggttttcagttcttcatgagctgttacaggaaacaatgttttcgaaaacaaagttgtccctggcccaggggcgccaggtcattccgtgcaagcagtccccatcagctgagggaaggcccaaaatatgcaagtgcatgagccaggctggcgtggcacgtgaggctgcataattttcgccgcccttccctaggtgttctgctgagagctgggctgtctgcttagaaatcagcctccaggcctgacttttggcctctgccccgcctgtggagtcggtgcgggctccagattccagaggcgaaggatacatcctagtgccagctcagatctgaaacaggcgtgcccttcgttttcaggtaacttctgttctggtctctgaggctgtgctggagcactggccgggattccaggcggcattttgtatttggagacagcaatctggggaggggcataaatagtaggaggggcagtgtcatctgtttttaccttttcttttcttcttcttctcttcttctttttttttaatgtagtctggtctttccaactttgttttcagccaatgcagaagatgtctatttgtgctgcacggcccagaagggaactgccagttcagaaaatgtcaggtcaacttgatgctcccggttgacatttggcactggcttgggggagcaggaaggaaggggaggaaaaggacgtggagaagaacctaggaaggattcgtactttcgtgcttttcttcttttctcctctcctcctcttccagtctgctccaggctgacgggaagggaaaggcaagtagctgggtttgatggggccctgcggggaatggggtggagacggggcaggagggggagctgtgtgtctcagaaccactcctgctcctgaccacgctgccccccaacacacaccacaccacacataccacacacataccacacacacaccacaccacacacaccacacaacacaccacccacaccacaccacaaatgacacaccacacaaaccacaccacacacacacaacacacaccacaccatacaacacacacactacacatccataccacactacccacacattacactatgtcacaccacacccacacatcacactacacatacacaccacacacacaccacataacaccacacacacacaccacaacacaccacccacaccacccacaccacacgacacaccacacacaccacaccgcacacacacaccacaccacccacaccacacactacacataccacacatcatccacacaacaccacgcacacataccacaccacacacacaccacccacacacttcacactacactataccacaccacccacatacaccacaacacacacacacaccacacacacacaccacacacacatcacacacaccctcctcacaccatgtacacacacaccacacaccacaccccacacctcacaccctgcaagcctgtgttccgagctcctcagggagtggaggcccctgaggaacagcctgaaccagcatttcccagggttcgcagctccagttccttgcctggcaaattcagtaaatcccaggctgtcacagtttaccacagctgccgtaacaaagcaccatgaagcatgctgcgcctacagagatgtcctgcctcacagttccggaagccacgtgtcccagatggaggtggcggcagggcgggttcctctgaggctgtgagggaggcgctgtcccaggccctccctggcttccgctgggggtgctggccaccctgggcgttccttggcttctagaagcatcgcccagatctctgccttcatcttcacccggggtgctctccccgtgtgtgtctgtgtccacatttcccctttttataaggacaccagtcagactggattgggggcccaccctactcctataccatctcttcttaacttttctctgcaacgaccctgtttccacataaagccacattcagaggtactgagggttagaacttcaaaggatgaatttgggtggtgggggccgcaattcaccccatcacagcaggtgtacatgctccctgcttctggggctccctgccttctggggctttccactctgagatcaaggtgcccaggatgtggagcaggtcaggtgttcagaattaggaggagtgcaaaggtaagcagagacttgtcccttggccctcaagacagaagtggcaattgcccggggccattcagagctgccaaagcattttcctgcttattagccattccagcctcacaactagcaaccttgagagaaaggtctggagagaatttttatccaaaaagatggagtaacttgtgcaaaaatcacgctgtcagctggagttggaacttgggtcttcaggctctgtgtgtggccctctcaggaggttgaaccagtgatatgggggaggggtatgcacgaaggttctcctgttgcaggggttcggggaaggcattgtgaacgtggtgacatctgaggagggccttgattaaaatttgagggagaagggagctttttggttgcaggcgacagttaagtgcaaagggccaccaactcaaagtgtccctgagtttggggtgctctgaagtggcatcgtcctaatgtacaatgggaggatttggtttttatctgatctctgtcacccgctgacacctttgtctcatccattaccctcagccacacctcatctattcgttagttaattaattaattttttattgagacagggtctcgctctgtcacccaggctggagtgccgaggtgtgactacggctcgctgcaacctccacctcctgggttcaagtgattctcccacctcagtctcctgagtagctgggattacaagtatgcaccaccatgcctggctaatttttgtattttttatagagacggggttttgccatgttgcccaggctggtcttgaacttctgagctcaagcgatcctcccaccttagcctcccaaagtgctgcaattacaggtgcgagccaccacgcctggcccaccccctccgttagaaaatagaaagctcttgctgctttctcttcactggggccaacagaacctcctcgtctaaactctcctctctcaacaaaaattctccccacagccttggtgtgcagcagttcatgcaaataaacccagaggatgatgccaagctggactcttctttccattttgagctcctgtcccccgcccatggctcaaagcccctctggctcatggcacatcagggcagggttcccacctgcacacctcaaaccttgggatgaaagggttcatagctctggtctcacggatcttccccacagcagagccaggcgagctttcctatggacacagcccaggcctgctccccaactcccataggctaagatggccctgcaggacaggtaggaccttggcaggcaggacaggatgggagtggggaggctgcagacgtctgtagaactccatgctgttcctggatgcctccccatgcattgtcccatctggttcctgctcccttgcaggactgggcagatgccattccccttttagagctgggaaaagagccctctgtgacttgtccgcgatcccacagtcagaaagcatctgagggagactgaacacagttcttctggatgcaaactcagttctcatttcccaacctgactcagcctctgggtggaggcagcttctttagagaggacgcgcatctgatgtccttgcagagaaaccctctgcagaggctgctggattggcaagggcataggggaggggacagggtgggtgcagcccaagatcactggagttcctgggaagcggggagtctgtggttctctaatggctgatttttctggggaaaaggtggtgttgactgtcccagcttggatgagaggatttgcgcattgcatctgaaaccaagaaagactaggatcgtctttggaatgtttgggatggttgattccgctaaggactattcataaggcacatttaccagctctcccttaggtcttttcatgaacatgtttttattagttcgttctcacactgctataaagaaatacccgagactgggtaatttataaagaaaagaggttgaactggctcacagttctgcaggctgtacaggaagcatagtggcttctgcttctgaagaggcttcaggaagcttccaatcatggtggaaggccaagggcgagtgaggcacttcacgtggctggagcaggaggaaggtgcaggggaggtgccacacacttttaaacaagtagatctcacgagaactcactcactgtcacgagaacagcaccgaggggatgtgctcaaccatgagaaattgcccccatgatcctgaacaagcacacagaacaggctgcccctgctgctagaagggcttcttgtgggcccccttctaacccccaccagctcctgagttagaatccaggagggtgcatctgattggctggacctaggtcatgtgcttgagccctagcagccccggcagcaagggaggctggaaaaggcaggagtgaaggggctcagcttctgtactaggaggttccacgccctgcctcctacacgattcatacataaatagaggattccctgaacccaggaagggagttcagatgctgggcagccaggataattacaaatattctctacgttagggtgtgtgtgtatgtacagggcagggctgggatgagcagggtggttaagagaatgagatttggcatcacacagatgggtctgaggaccagcaatcttcacttattatctctcagtcctggcgatatacagcctgtcccagcctcagttttcttgtcagcaaaactgggatactaatgcctatttcacaaaatggtagccttattattcttatagtagatgttattattaggaatattgtgatagcaatcataacatggtgtacccatcatgttatgatacctcggtcatgaactgtaagcctatgtgtaaggcctggttagattgaccttctaattttttacatgtctctccagcacagatggtcaaatcagcttttgaggcctgagtcctgatacagtcctcaaaaggcaggtgctttttttttttttttttttttttgagatggagtttcactcttgtccaagttggagtgcagtggctcactgcaacctccgcctcctgggttcaagcaattctcctgcctcagcctcctgagtcgctgggattacaggctcctgccaccatgcctagctaatttttgttatttttagtagaaatggggttttgccatattggccaggctggtctcaaacccctgacttcaggtgatccgcctgccttggcctcccaaagtgctgggattacaggggtgagacactgcgcccagccaaagagcaggtgcttttaaaaggattaacctaagctctaagtataaagtttttattgctgttttatcctatagtgtaatgaccctctaacttttaattgtatatatatctataaaatatatagtcttatatagcaatgtctggttgggtgtgcccaaagtcctttatagctctaagcttcagaaaagtaaatagaagaagaagataattaaaagactaagataaaataaaacaattgtctttcccactggaatttggaggagatggagtttgcaagtaggagagttggaggggtagttcagcagctggttttatcggcaaataggccagttaggaggggtcgctgaggtttattacatgaaatcctcaatgggtgggcactgcagcacagagcaacctggagtgtgtggggtgggtaccccagtcaacacacacaggactcttgcaaacaggctccttgactgacatgcttctgtataactttcataaaaagatattgatgttcagagtaatcctggggctatgtagatccagaaaccgtcaaagaaagtttagattctactcagtagatttttaccatgaagcacatttcaccgtgttctcattcttggaaacttagggatggatgagtgatgttaattgcagtttgcaattctctgtcgaccacaatgttgaacacagcgggatactctgttctcatgcctacgtgaatagctacctaaatctgattgttaagtaggcccataaggtttacaggacagttttttttttttttttttttttttttgcacatagggaaaaagatgagtcatggtacatggttgatttctggattgtatcaaattgggaagaatttatgtaatcccaaactggtatatttgcaccaaaattcttgataatgacaggttgaggctgggtgtggtggctcatgcctgtaatcgcaaagttttatatatttttttgggagaccgaggcaggtggatcatttaagatcaagagttcgagaccaacctggccaacatggtgaaaccctgtctctactaaaagtacaaaaattagccaggcatggtggtgcgtgcctgtagtcccagctacttgggaggctgaggcacaagaattgcttgagcctgggaggcggaggttgcagtgagctgagattgtgccactgcactccagcctgggcaacagagtgagactctgtctcaaaaaaatcaaaaaggaaaaaaaaaagacaggatggtgtgatgagtagagatttacagaaagcagttttccctcagaaaggaggaggggagtagatggaggacagtcctctgggaatggtgagagctgggtagaggaagtgggttttgaacgataagtttgaagaattcattcatttggtcaacaaatgtctactgagcacctacaatacatcaggcagggttctaggcactggggatacaatagggaacagaacagataagtctcctgccctcatggtaggtgtgtggttttcaggttactctggaaaaaggatgaacattgggaaagatggaggagagagtgagtattgtgtagaggactgtaggtaggcttgcttcttttatacattcgttcaattaatccagcatttatgggccatcttccctgggcagattttatgcaagacactggggatacagagatgacgaagtcttatttgagaagttcaaagtctggagcatggaggcacagactttatggaacaggatgactgaggtctggtagaagcaggctcagaggaaaaatatgctaatcttgctagagaggatttgaaaagcttcctagaaggaaagaaaggatgctgactgccagcctttagagacagctgagagcttgccaggtagcagagagagcggaagaagattctaggcaaaaggaatgagaagacatctattgggggaagggagcactaaaagaaggctgtcaggcaggggaaggctgatggtggagagcctttatgggaattgtgattttaatttaatttgagacatgatgggggccacagccaggttgaggaggtaactccatgaaaattacatttgaggttgatgacttctgtgtgcttgttcaggatcatgtccttaaacagggaatactcattagcaaactaattaaggaccttaacaggagggacggtaatttgttgggttttagaagacttagtacaataaatatattgattgagtttgggtttgccaaggaattaaagagtccgcacttccctaataaaaataaaatgaaaatacttttttggaaaactgacagtaaggcagtaatgactataataaaccagaagtccttcgtccacaaaccactgtggttgacaataagggattaaacattacctgaattggtagagaaattattaatagctgttgctttttaaaaatagacatttactgccagtctctggggaggagggagaagcagaaaggtgcaggtgctgatggctttgaagggcattagctgtgcctcttccattctcattttctcttccctcattcccttttccaaactgagaacctggattccatgtccaggtgggcagagggaggaggaggaagacgtgggagatggctggaaagaagaacaagccaaattcttatgtacttctgggcatgcttgtgctcctgttttaattttttataccttgcaatttagtgaacttggagctccaaaacgtctgttgaatcttgcctcggtgctctggttctcagccttggtggcagcagaaacccttaaacaaaaggttgaaaactgcacgttcccagcgctttcctccccgcccctttcctgggttttctgtttactgggatgtggagaggaagtgcaaactctgtagtttctaaagttccacagggggctttggatgctttacctggggttgaggtactgacttggaggctcacttgttgtattagtctgtttttatgctgctgataaagacatacctgagactgggtaatttataaagaaaaagaggtttaatggactcacagtttcacatggcagaaggcaaaaggcacgtcttacatggtggcagacaagagagaatgagaatgaagcagaaggggtttcctcttataaaaccatcagttctcatgagacttagtcactaccacgagaacagtatgagagaaactgcccccatgattcaattatctcccactaagtccctcccacaacatgtgggaattatgggagctgcaattcaagatgagatttgggtggggacacatatcacttgtgtccccaaaccatatcacttgtgttctctctctctttcatttttttatttttttgagacagagtctctctgttgcccaggctgcagtgcagtggcacgaacatggttcactgcagccttgacctctgggcttaagtgatcctcctgtctcagcctcctgagtggctgggaccacaggtgtgtgccaccacacaaggctaattttttaatttttattttgtaaagatggggtcttgccttgttggccaggctggtctcaaactcctgggcttgagtaatcctcctgtcttagcctcccaaagtgctggcatcataggtgtgagccaccacacccagcctcacttgtgttatctggacccctattttagatgtaagtagtcctgggaaggcagtgctgctctagactttccatggctgttttgccagacatgcagcagaactggtgtgcctgtctggggtagggagatggggcccagggtgggctctgaaagaaggctctggaaggagtttggagcatgacagcattgggtgccctcagggggcaaaacagcagaggacaaggtacagaaagatctaggtggtaggagaggcttccagaagagaggcagtagggacctgggtctcggctatgcaggcccacgcccttggacctcaggcacgcttatctccagcttctccccttccctgctgtgggtggggcatgcccacctgctgaggaaatacctggaaagaaaccatgggacaacaatctaaccggtacttttccactccatatggatctagaactcctggcacatactcctgtgtgatcttgtggaacactgggcttctctggaggagtcattaagtgctggctgcaccctgaaacggtggccctgtgactctgcagaggtcaccacagaagttctttcactctgggtcatcccccatctttagctcccctccccttggtcttgtgttgcttatcttcattaatttgtgatgaggagatatgtttttatcactgaggcctcagcctgccacctgcctccccgttttccttttgccttcagaaactagttatttttacaaaggagggaggagtgctcctccctccaattccatttaaaacaaacatggttttggcacaacaagcctgcctcctcgaagtaatggccgctcccccgtgccagttgctattctgccctcatgagagtggagcgtgtgtttcctcccctagttcctctttgtttctctgcccttcctcctctgagggcacaggggcagacaggacatcctcccaccaggggctgcctagtgactggccgaagattctgatcatttcaggcctcccttcacattctccagcggcattttaaggtctttgctgtaaggcaaaagctggtttttcatccttcctccttatccaggtcttctgtttctggggtcagtctggtgcgtagacagttccacacatactctgtattagggatcctgaaagagagaaagctaaaagggacttcttccatttcaagaagagacttaaacaagatagaattccctttccttcttatgagactgagaataagcactctagcagcccttagtatcagggtcccaggctccctctgccatattgttttgccatctatagggtgttgctgccttttacgggactcacagtgggtcacaatcatttattgatccaggtagtaggatgccctttaagggcctgattcagaagttgtacatatcactgccactcacatcccattggttggctcttagtaacatagccctacctagaggtaggtgaggctgggaaatgtagtctttacgtgggtgtctgggaaaccaactaaaatctctattaattattagaagttttaaaaagataaatgtttcatgcatgtgtgagaaaacggcattctctaattgtcgaatgcagaattctatatatggtcgttagttcaagcttgtaatttgtgtggctgttttgtctgcctgacccatcaataatagagacctatcaataattgaaatctctctcgacggtagtggatttgtcaatttctccatgtatttctatccattttttgttttatatattttgaggttaattaggtgcattcatatttggcattgtcatgtatttagcattccccatgtatttctatcaattttttggttttttgtattttgaggtttgttcattagatgcattcatatttagctttgtcgtgtcttcttcgagaacgaacccttttctctgcatccagtgatcctctctagccctaaatatgctttttcttttaaagtatatttatcctatattgacatatgttgttatctttcttcattcttttaatttcaacatttgttcatgtttttatactttagatataccttttataaatagtatgtaggtggattttgttttttaaatccaatctgatgattttctgtcttttagttggcaaatttaggccatttatattgattttttttaatttatttatttttatttatttatttattttttgagatggagtcttgctctgtcgcccaggctggagtgcagtggctctcaatctcggctcactgcaacctctgcctcctgggttcaagcgattctcctgccttagcctcccgagtagctgggattacaggtgcccaataccattcctggctagttttttgtatttttagtagagacaatgttttgccatgttggccaggttggtctcaaaatcctgacctcaggtgaatccacccacctcagcttcccaaagtgctgggattacaggcatgagccaccacgcccagccttatttcacatatttcttgcggcttttcctggatttatttttcttatttgaatatcacttcttcaaaaagtgtttttaaatgtggattgtagcatgacagacttcctcaagccttgtatgcctgagaatattttcatcacaccttacatttgaatgacaatcttgccagaaatggaattttaggttcaatgtactttcctcagtactttatttatggattaatactttttagagacaaggtctcactctgtgtcccaggctggagtgcagtggcatgattacagcttacttcagccgcgacctcctgggctcaagcgaccctcccacccacttcagtctctcaagtagctgggacttgcggtgctaccattcccagctaatttttgtatttttggtagagatggggtttcgccatgttgcccaggctggtctctaactcctaagactaagctatccacctgccttagcctcccaaagtgctgggattacaggcatgcaccatggctcccagccattcagcactttacaactcacacttcattatgtttttgcattcactgttgtggttaaaaagtatgatattcacttttaaagtgacttttaaaaagtatgatattcacaaaggaaaaaggttatttttccttagtaggtgttatgctccttctgagagttttcaaaattttctttttgagtttggtatttctaaattaattaattaattatttccatgattctgcatggtattcctaaatttgattctagtgtgcctagatgtggaattttcttctctttccttttgatgttctatgcactcttttaatttgaatatattcatctttaatgcttggaaacgtatctccatgaattcttcatctattttcttctcttcatttctatttatttttttctattctgtgactccttttgtctggatgctggtagttttactttcattctccaagtctcttaacttttcttttatattttctacatttgaattttcccctgcttgcttcctggagtgttcctcaatctgattttctaattcactaattcattctttagctgtatccattcaaccacgaagcccatttattgtgctctttattcccattatataatttccataccttgtattttctccctgttcttgttttatattgctatgtttggatgaacaaagagagagaatgggcaagcctgggaaagaaccccagataggatgcccccatttggtatcacccaccaagcaacacctgaggccagagcttcctcttcagatcctcaggcagaagcagcaacaggaataggcatgcacagtttatcatccccaactctgggattgggagggcagggaatgcagaggctactcagccttcactgaagttctataaggtttcactggaatgggacttctgggctgccctgattttactcttgtgtcagcagtctgggccacaactgccaatttctaaaggccgaggaaagatagtgattgtcccaaggcaatgatggaagagaagagtggaactcaagttgctttttctactgtctcctcctagagcagcaccagctggctcatcccaggctgcaacccttaccactcttaccaccatacacatgcaacagtttctctttcagtattctcacagtttttccgttagttcctgaattttgtgttttgtacctcaattaggttgactctgggcaagacgtataatggtttatgtgaattttccatcttggcaaaaattggagtctcagcagagcaacctttgtaagcctgttgtattagtcaggcttctccagagaaacagaacaaatagaatgtgtatatatttatagaaagagatttattatatgaaattggctcatgagattatggaagctgacaagtcaaaaatctgcagggtaggctggcagtctggaaacccaggagaagcaatgctttagttatagttctagttcaaaggcagtctgcaggagaaccaggaggtgccaacattgcagatgaagtccaaaggccatctgctggagaatcctctcttgctcaggtgaggccagtcttactgctttctattcagaccttcaactatttggaggatacccacccacataatggagggcaatctactcaaagtctatggatctaaatgttaatcttatccaaaaccaacctcacacccagaatggtgtttgaccaaatatctgggcgccccatggcccagtcatgtcaacacgtaaaattaactcttacacctgctattccaagtatggtttgaggaccagcattggcctcacctgggagcttgctagaaatgcagaatcttgggcccacttttgccaagatgcctgcattggaataagatgcgaatcttttcaatttattgagccagagcttcatatcagtaaaaataagaactttggattacataagagattctctgattaatgtccctgcatgatcagggatcttaaaaaaaaaacaattacataaaactgcctaggctcaccccagaccaattaaaaccgaatccctagaatagggctcaggcatctcttatcgtgttttgttttgtattttttttttaaatctatgctggtgaatctgttatccactgaaggtgagaatcttcagagttgtgcttctcaaactacaatatgcatgcacatcacttggagatcttgtgaaaaatgcagattctggctcatgagacctgggaaggctggagattgcatttccatcacttcctgtttcaggaccactgttggacttgggagatgctagactggatgacaggtgagatcctttgcagttctgaactgctctgatccctgaaaccaggagagcttcacaggtttgccaaggtgggttccacccagggacacacctcttagtatctaaccaggaaataaggcctccctctctgtggtttccagcatcttctgaactcctcaagtcaaagaaatcagatgccttcctgctgctgctacccacatggaaactaatacattgctcctattgaaagcttggctctgtgccctgtggccagagtataaggctctagaagatattaactgtgtcctctgtggggatgggcagattaagaatggtgatttggcatcagagtaacctcatgtggtgactgaaaaacgtaaactaattgcagaccaaatttaagatggtcgtacctgaagcctaagccgaggcctgagcggcaccctcaagagtcccctcttgtctcctcagctggaataactttttctcaactggtggctatcttggacgttagtttaaagctctgttgtaatgtatgtcaccctgactggagttctaggtattttgtttcttttctagattgagatctttggggcaaccactatgactctctgctttccttccagtcccttccaccacccatccccagctgcggccagggcagaccttagaaaacctaaggggttttactcccctgcttggagcgctccaaggaggcgcttgatgcttggagtaaaatctatactcgtccccatcctatctagtccctaatgaccctgcaatgtcatccttccccactgtcccttgtcaccctgctccagccacactggcctctccccatgcaacaagcccactcttgcctcagggccttcccagttactattctgcttttctttttttttttctttttgaggtggagtctcgctctgtcgcccaggctggagtgcagtggaggatctcaactcactggaacctccgcttccagggttcaggcgattcttctgcctcagcctcccgagtagctgggacaacaggcgtgtgccactatgcccagctaatttttgtacttttggtagagacggggtttcaccatgttagtcaggctggtctcaaactcctgatctcaggtgatccacctgcctcggcctcccaaaatgctgggattacaggtgtgagtctctgtgtcaggcatcccagtcactattccttctgccaacacactcttccccagctcttcatgtagctggctgcttcttttcattcatctcacagcttcaatgtcactgcttccaaaggaagacctcccttctaagtggtctttctcatgccaaaatgactgtgtaccccataacttattttaatgtctccatagcatttatgactattagaattctcttacatattgatgttttctgatttattctctcttcccttgtcctcaccccctaccactacattgtaaactttacaagccactctatatctcttagtgtcaccttagtatctctagtgcctagagctttgacctgcagcagtaggaggtccttgattattaattggattaatcttgaattttccactgcacttagctcagttcattcatttaacaaaggatgtttttcctctaaccaaaatatgggtagcaattttgggtgtcctctggaaaaacttattcatggagaaacttacaaaaacaagatacatttgacagaaatagcatgggactcaatcggactctagtttgcattggtaagggtaaatgtggggccctgggctgtgaaatgtttgccaatcagatttgaggaatcataaaaagttcagaatcagcttttgcttctgccccctgctctacattcctcttgggtgcccagtggtaaactggcaagaagcagcagctgagggcatgggcaggatgttctggtcctggatctctgccttgcccccacatcctaacaccactgggaagacagaagctctcagcacctggcccaggtttccactaaaccctggcaaagtaacgcagatgtgggatgccagggccaccacacagggaggcaaagagaccttcattggaggaggctgctgctgctaggggtgtagaggtgagccaggggccagcagcagattgtgccaggggcagctgggaatgggctgtgcctccaccgagcctcaagccatcctctgatctcgctagtcagacttgaccactcttccagatgtgcatgattcaacccaacacagctggcaaggtggaggggcaatatgatgtttcactcgtactaatgttgtagcttcacagcctcttggggtggtccataggcccctccaaggtggccttgggtgggtggaaggaggggcagaggttggcatccaaattgctccagactgagtctactttcaagatctattttgcactggagatgtaaatttccacttaaaaatgcaaagtgagcattaacacagaggcgtggctaaagttatttgctctgaaaaagatgcgcagatatttttgtgtctggtgggaaaggagagagtgtcaaaggatggacaaaggccacctctgtgtgaaggtggcttttgtgattttggcttaaccaaaaggtcctggagatggagtgacttggattctgattatgggggtgtctgctgtgtcccattcttctcattcagttgaatttaattcatcaaggaggaatcgtgtgcctgctctgtgccaggcactgtcaggtgccgggaatgcagcaatgaacaaaatgtagatcaattcctgccctcttgggccttactacctggcagaagatataaaaaagggccacttccacagcattgtgatgacagtgggatgtgaccatccctttcctagctagaactggggatttggagtccgaaggcccagttgacgtttctggcccttcaacttccagctgtttgactcgaggccaattatttatttatttatttgagacaaggtcttactctgttgcccaggctggagtgcagtggtgtgatcacagctcattgcagtcttgaattcccgggctcgagtgaccctcccacctcagcctcccatgtagctgggactacaactggacaccaccaggcctggctaattttttaatttgttataaagacaggaaggagtctcttatgttgcccaggctggtctcgaactcctgagctcatacaatcctctcacctcagcctcctgagtatctgggactataggtgtgaagaccacgcccagctgattttttaatttttatttttagtagcgatgaggtcttgctatgttgcccaggctggtctccaactcctgagctcaagagatcctcccacctcgggctcccaaagtcctgggattacaggtgtgagccactgcacctggcctatttactttttttaagctttagtttttttcagttctcatatgaggaaatgacatctgccatgtccactttgtgagtttttaaaaatgagaatacagtgagataatctacctgaaagctttttgtgagctcctaaggagacttttgaactgttattggtactatgatctctcactatcctctataatgtcatgatgctacttgttatcaaaagctgacaaaagctataaacgtgcactctttgtcatagtagccactagccacatgcagccgaaatggggctaactggaattgagatgtgctgtgagggtaaaatacacactaaactgtgaatttagtaaaaaaaaaaaaaaaaaaaaagtaaatctcttatattgaatatatttttgatcttttgggttaaattgaatatattacttaaagtaatttttttttttggagactaggtcttactctgtggcctaggctgaagtgcagtggcgtgatcctggctcactgcaacctcaacctcctgagctgaagagatcctcccacctaagcctcctaggtagctgggaccacaggtgtgtgcaaccgaacccggctaagtttattttttgtgtgtatttttttggagagatggagtttcgccatgttgcccaggctggtcttgaatttctgggctcaagcgatcctcccacctcggcctcccagaatgttgggattacagcaggcctagcctaattttgttaatttttaaatgtggctaccagagaactttaaatgaactatgtggctcacattatgtattgactgaacaatgcatctgtagaggctgtctttggaagtttactatataaccaagacccacgaacactcatgcagttcccaggggtatcatggactgcttaaagtcccatctgtgaaaccctaacatgatgattttaaaggttacttttcatttacattcaaaatgtacataaagaatgtccctgtgagattagatcacttaagggagaaccatgtctgtgtttcactacgcagaaaatggtttcatcgtctttgtcctgaaagccactgcctggaagggctgtgcagcgctcagagtgggagaggcagacctctgagacaaatgacttcagcatcactacagctgtggctagaatgagaacagcctcaaatttcactaatgaagagattttctgagttccatgtgagcaacgccgcttccttcccatccccgagtgattccccttgtcaaagaaaaaagacacaaccaaaagggagagctgccatcctttcaggtcccttcttgttcttcgtctcactgaattcacccctaaatgctttgaagtattctccatgactgtttcatcaactgaggaaaggaggcccagaatggcttagaaacttgctaactggtttagaagaagaactgagattcaaatgctttgcagtgtaggtctgcttctgccacaaaatggcagccaggggaggaaggagaaagtgaggaaagggggaaaattagcgctcgggctttgtcagatctcaggagaggcggacgctggctaagccccatcgccttatctttattttgtgagaagcaaactgtggggtttggttgcaagagaagatcttactagggaccagttgcagggtgtattaatcaggggtttccagagaaacagaactaataggatctatctgcctgtcatctctctctctctctcctatctatctatctatctatctatcatctatctatctatcatctatctatctatctatctatctatctatctatcatctaatctatcatctatctatctattcatcatctatttatcaactatcatctctcatctatcaactatttgtttgccatctattatctatctatcatctatttatctattaatcatctatttattaactatcaatctatcatctgtcatccatcaactatttatctgtctatccattctctatctatctgtctctctgtctgtcaatcagtcagtcaatccatcgccagaattggctcacattattatggaggctgagaagtcccacaatctgatctaccatctgaaagctggagacccaggaaagctggtggtgtaattcagtcctgggaatggaggtggtgggaggatactggcgtcagttccagactctaaaggctcgagaaccaggagctccaaagttcaagggcaggaaaaaatgaatgtcccagttgaagatgagaaaacaaattcacccttcctctgccattgtgttctattcaggccctcaatggatgggatgaggcctacacacactgctgagggctctcttctttgctcagccgaccaattcaaacgctcatcttttccagaaacaccctcatagacacacccaggaataatcttttaccagctatctgggcatcccttagcccagtcaagttgacacattaaaattaaccatcctacagggatttcctaccgttttggggaagccatcttttcatggcttccttccagaggaaaattcctgctatatgcttgacagaaagaacaaaaccccaaacatacaaaaagaccagtctgtggaatgtagacaatttgggtcagatgtggttccctgcctagaggagccagtgagatgagccatttccatccaccaaagatgggcttgaaatgtggtctacctttcaacatggtgccactgagggcttctgagctggctgtgatcatctgacaaaacgctgtgttggccaactcatagaagagtttgctagctggcctggccccaagcagaagcagcaggttactgcccaaattctccaagtgggatgaccagcggctatataaagggcaaacaaacaagaaagcctttctttctgagaatgtttccactgcagttaggttagaaaatgatccagggaagatataaactagccctttcatttagcaaaataaaatgcctatccgcttggtaatctgtgcagtggaagtcagagccagagtcttgtttttaaagattttgtttaattcaccacccccatacctcccctcccactgcctagcatcaggctggacaagaagaaaagggacactggcctgcagatgctgccacgtgacatgtccttatagaatagcttctgtgacatttgtattaagtaaccacaggaaaaaaggtgaggtgttgatgacagaaggcatctgtattttctggggttgggttccagttttaatgaatatggataatgcacaaaacatctcatttttcggagctgtgttttttcattaaacactgccactctgcatgggaaaggaactggacattcctgacacattatttggcaggtctcaatcgcaagtgctccaatattggctttcggaaacccattccagatttggcccagattgtcaaatcttgtccagagcaccaagtcaaaaggtgcctctaagccctgggcagagtgccaggctctgaaaaacactggctggatctcctcagggaccctggctgagacaggcgagtgatttgttcttcaaatgacctttccctccttggaaaagagcacccggaataaaagtgcaagatgtgcttcagatgtcccccaagagtttaacacaagcagaggtattgaggggcttctgtgtattgaccaaagaagaaacatttttttggctgggcatggtggcttacgcctgtaatctcagcactttgggaggctgaggcgggtggatcacctgaggtcaggagttcgagaccagcctggccaacatggtgaaactcccatctctacccacaaatacaaaaattcgccaggcatcacctgtaatcccagctactcgggaggctgaggcaggagaattgcttgaacccgggaggcggaggttgcagtgagtgtggtggtgggcacctgtaatctcagctactcaggaggctaaggcaggggaatcaattgatccgatcttggctgcagtgagccaagatcgaaccactgcaccccagcctcggcaacagagcaagactccatctcaaaaacaaaaacaaatgaacaaacgaacaaaaagaaacattttttccctgtggtaggatgtctgccctcaagcagtgaacccaactactgtagaactggtggcacctgtccaattaaaaatgacatttgctttaaggtaaaaatatattatatattagggttggggctctgtcttctcctgagtagtgtgtcatccagcatttttcaaagcatggtctggagaccctcctacatcagaatcaggggacgtgtttcaattacaaatttctgaccaaaccacctaccaaatacgtgggaactagagctaagaattttcactgtaccaagctccaggaaatcctgatataccccaaagtttgtgagccattggatgtaaaaaaccacatacatatatataaaattgttgttgtttgtttgtttttgagatggagtcttgctctgtctcccaggctggagtgcaatggcgctatcttggctcactgcaacctctgcctcctgggttcaagccattctcttgtctcagcctcctgagtagctgggattacaggcatgagccaccacacccagctaatttttgtatttttggtagagatgggatttcaccatgttggccaggctggtcttgaactcctgacctcaagtgatctgcccacctcagcctcccaaagggctgggattacaggtgtgagccaccacacctggcccccttcatatattttaaagccattaaagcaagctgtgatggacaataagattggtttcttttgctcacatccatgtgaacttatttaattgtgtgtctgtggtagtgaaactttgaaccacaaaagacagggactactttaagccttcgcttttgcagattgatacgtgtatctcgtccttttgcagttacttgtcattatctgcctaagaatagtatttctaagaagttgtttctgtgtatcttctggggaagaatttgtccttcagttacatgtgattgcaacatgttgataaaagcaaaagaaaagcaataaaatcatttggttgaatatctcatttctttgaagccaaacagtttttgagtgataagaaagcaattcagtggaacttactgttcagcatcttacagaacaggattcatatgtacttgtgtattcacatgcgaattcatgcacacattatcacctaagagagtctgagtgtcctggtcctcaaagtatgtggttttcagaatttacactgtatacaaatctagaacgacatttgctgcctaaaggacaatgacgttagatctacacagcaagagttgaatagagctttgttcatcttctcacaaatttgggtggatctaaattgcttattttaggacaatttaaacttcctagtttaaaactttatggttatctggttaacttaggtgaagtctattacattagacagcaatgaaagcaaatgagccacccgccaagtaacaaatggacctttaaccaaatattcctaaatattccaaatattcctaaatcactacaaaacgcttctctaaaatccccaaaactgttccatccagggacaatataaagtcaacaggaccctatgaagatgccagtgctaaaccaaagtcagaacatgtttcttcttatgaacaatggaatcttttatccataacggggtctctttttagtttgcctggtaaatctagaaataccagggtgacccccactgagacatcatagtacccaaaggaaaatgttgcttccttcattctgtgaccatagagagtttaaaagtgtgtagccaaaacttttgttagttttagaggagatgcatctaatgattttgctgtggttgttaggccagaagttcatttagagttcatctatgcctctagatcattctcccaggtcctcttacaacttcctggctcaatcatagtggtaaggtccaccttgttcaactcccatgttcctaagcaacattaactactatgacgtgaaatcaggaagacaattgcaaagtgctttcaaaatgtgtgtgtgtgtgtgtgtttgtgtgtgtgtgtaggagaatgaaaaaaaatcaggtcttaagacattgcagaggccaggcacggtggctcacacctgtaatcccagcactttgggaggccgagatgggcagatcacctgaggtcaggagttcaagaccagcctggccaacatggtgaaacccatctctagaaaaatacaaaaattagccaggcgtgatgatgggtacctgtaatcccaacctgcttgggaagctgaggtgggagaatcgcttgaacccgggcggtggaggttgcagtgagccaagattgtgacattgcactccagcctgggagacagagcaagactccgtctcaaaaaaaaaaaaaaaaaaaaaaaaaaagacagcagagtttaacaaggaaattgaaatctactctaagtattttaaaagagggtattagaaaacactctgctatgtctcaggtgaaacagagagtatttaatttaatttaatgtatttacttagagatagggtcttgttctgtcctccaggttggaatgcagtggcataatcacagctcactgcagccttaaagtcttgggttcaggtgctcctcctgcctcagcatcctgagtagctgggattacaggcaggcaccaccacacatggctaatttttattttattttttaaggaggatatcgctatgttgcccagcctggtcttgaactcctgggctcaagtgatccttccatctcggcctcccaaagtgttgaggttgcaggcatgaaccaccgctttggccaacagacggtatttatgtaactgcccaaggggttctccttgccagctgcctagacagagcctatttatcaagacaggggaattgcaatagagaaagagtgattcacgcagagtcagctatgcgggagaccagagttttattattactcaaatcagtctctccaagcattcgtggagcagagcttttaaggacatcttggtgagtgggggcgtgggaggctagtgaaccaggagtgctgattggtcacagatgaaatcatagggagtcaaagctatctttttgcactgagtcagtaacctgggcaggggccacaggatcagatgagccagcttatcagtctggatggtgccggctgatccatcaagtgcagagtctgcaaaatatctgaagcactgattttaggagtggtttagggagggtcagaatcttgtaacctccagctgcatgactcctaaataattttttctaatctcgtggctaatgttagtcctacaaaggcagtctagtccccaggcaaggaggaggtctgctttgagaaagggctgttatcatctttgttttaaactataaactataaactgagtttctcccaaagttcattcagcctacacccaggaatgaacaaggacagcttgaaggttagaagcaagatggagttgattgagttagatctctttcactgtctcagtcataattttgcaaaggcggtttcatttgctacaaagaattggttcagtgggtgataaaagttctgagaggccaaacaaagggcagtggaggaacccagaagttggtaacagcaggaagccactatgtttctaggcttgcgagtcaaaaggaggggaggttgccagagccaggagctgggttactcagcacccacggtgggcatgtctgggaagaactggagtcacatgggatctgcaggagtggctgagatacctggtgaggtagagagagaaggggagagatcctctggcttctcctttcttcccactcttaatctcctgacaatgccccgcttagccaaactcacctggaagccaggaaaacaccatctgcatgggtcagccccactgaccagcacaggggaagaagcactggatctgactggctcagtggtccgtaaggaatacggcaggaccgactcctggctgacaaaggtgggagtcattgaactagtggaattctggccatcacctcacgcacctacttcatggcatgctttcatctgaaccattttattgcttgagggtgataatccatgacctttaaaacacagatatatcactgggtgtggtggcgtacacctgtggccccagatacttgggaggctgaggtgggaggatcccttgagcccaggagttggaggctgctgtgaactgtgattatgccactgtactccaggctgggtgacagagggagactttgtctcaaaaaataaataaataaataattaaaaaattgaaaaaataaaaattgaaagttaagaaaaccacagataagtcacgggcagacctttatcagaaaccaccgtgcttgactacctggggcagtgctgtggttctgctgggggttagaaatgcaactggaaggcctttgacggccactaagagggccacacctttcgttaattctcctctaggatgttcttgggaaactgagttgaagactcttcatgaactcatattggttcttctcaaggaagagcctctgcctatggagagttgtactaacttatactctttagaggatataatgacctaatataggcaagaaaatatagtacttattattagaataacaatccatctataaaatgcatctgttatggaaacacagctcatggtgagaaccgtaaatagctttgttttccattttctatactgcctccccaaccaatacagacagtaatcaatctggaatgtcacttacttaatggtatgatctggcctttaaaaaaaaataaaaaaataaaaatataaaataaaaaataaaaatttaatttcaaagcaattttcgatttacagaagaattgcaagcatagtagagagagttcccataggcctcacatccactgtttcctgttattaacatcttatgtaagtagagtccatttgtcacaattaatgagccaggtacattattattaactaaattccacacttgattcgtattttcttcaggttttcctaatgtcgtttatgtactgttttctgttttaggatcccactggggacaccacattacctttaatcatgcctctttaggctccttttggttgtgacagtttctcagactttcttggtctttggtgaccttgacagttccaaggaacactgtcacctatttgttagaatgcagagatgagatttgtttgatgtttttctgttgattagactggggttatggagttatgggaagaccagagaggtgaagtgtcattttcagtaaatcatgtcaaggaatggggattagaaatgcaactggaaggcctttgacagccactaagaaggccacaccacataacacctacacgattcatcactgttgatgttgaccttgatgacctggctgaggtagtgcccgtcagacttatctagtgcaaagctcctcttcctccatcccttccatgctgtactctttggaaggaagcctttttttttgagacagagtctcgttctgtcgcccaggctggagtgcagtggtatgatctcggctcactgcaacctctgcctcctgggttcaagcaattctgctgcctcagcctcctgagtagctgggattacacgtacctgttaccatgcccagttaatttttgtatttttagtagagacagggtttcaccatgttgtccaggctggtctcaaactcctgacctcaggtgatctgcctgcctcggcctcccaaagtgctcagattataggcattagccaccacacctggctggaaggaagtcattttgagtgatgctctacttttttgaggagcaaatatctacatgatttatttggaattcctctgcactagagattggtctattcttcccgatttattatttaaatatttggtcatttatttatattagtattggactcatgaatacttattttctatttggggttatcattcaatagtactttatttatttgtttttgctcaaatggttcctgctttggtcagtaggagttctttcagttggctcctttgttcatttgacacactccccatcattgtggttttttggtatgcttagttgtttagcatgtcattactttggcactacaaaatgccccagtcttagaatcagccatttctccagggagccctggataagccattgctaaagaatcattttagaaaccaagatctaggtgctaaatgtgtccaacctggcccccccccctttttttttttgagacaagatttcgctctgttgcccaagctggagtgtggtggtgctatctcgcctcaccacaacctccgcctcctgggctcaagccattcttccacttcagcctcctgagtagctgggaccacaagtgtgtaccactacacctggctaatttttgtattttttttgtagagacagggtttctccatgttgcccaggctggtcttgaactcctgagcttaagccatcctcccatctcagcttcctgaagttctggtattacaggtgtgagccaccatgcgtggaggcagcctggccacttttaatctatccattcatttactaaatatacacattttctgagtcccgattttgggcaagactctggggcaggcaagaaaaatgaggtgcaactaactctattactccatggtccaagaagagggctgcctgcaagctatgaatagagcttacagagtatttaaaggtggaaagagactttgctcctgattctagactttatctcctatcctcaaggtccatgtcttggtagctctgctcagatctacccttccagagtctgtaatataaggctgacccgagtttgaatcctagctctgccacttagtagccatgtgatggaacaagtgtcttaactgcactgaacctcagtttcctcatccttaaatggggggcagtgatgctaaaaggaagcccctccagaagccctggtgaagatgaaagggaggacttgtggaatgtccagcccagtgtctgcagagccaggcacagcaaatgctggtgagcaacaaggtgacaacagtcagtgttcctcttgggatataattaactttggagtaccagctgattcctaggacagagttggagaagaggatataattaacacgggtggtaaaggcagagtcaaggaagtagctgtggagtgagctgatgcctggggtcaaagacaggtctgtcctgcggatgacatttctcttgagaagtaaaccgtcagcaatcaggacctaggggtcacctagcatttggtggctcaacacaagctctagtaccaggaggtatggcatctgctacaaaaacaaaatgcagtcgtcacaatttgtgctcatcaaaatgcattaacatagtttctgccatcaaaacctgcttgacattaagaaggggtcctcttgctagggtacccaaccacagagctgctccctcagagggtgaaaatatgcttaacacagggctttctgttctggaaagaaaacaggacttaaactgagctgcttcagagagggttgagagcttctttatggagcaggcaaagcatggatgtcatgaactttcctaacacactaggtgaggggcagccctacagccctgagatagaatggcttttccattggtttttccaatacccgagggagggcatgactatccccattggtgtttttccttcacttgagaagcatctaggccagtgattctcaaagtgtggtccctggaccagcagcagcagtgtcacctgggaacttgttagaaacacaacttcttgggttccatcccagatctacttaattaggaactctggggctgggcatcactcctctttcctgcccactgcaatctatgttttaataaacactccaggtgagtgactaggatgccagctaaagtttaagaactgtattagtccgttttcacactgctgataaagacctacctgagactgggtaatttataaagaaaaagagatttaatggactcacagttccacttggctggggaggcctcataatcatggtggaaggcaaaaggcatgtcttacatggcagcaggcaagaggaaaatgggagccaagcgaaaggggaaaccccttataaaatcatcagatctcgtgcgacttactcactatcacgagaacggtattggggaaccgcccctgtgattcaattatctcccactgggtccctcccataacatgtgggaattaggggtgctgcaattcaagatgagctttgggtggggacacagccaaaccatatcaagaacaattgatccaaaggctgcaggattgtccacaactttccattggaatcctaaagacatttgaaactctaaggactttgaggtagagattgactttctcttgcatatgccattaagtaggtttgcagtaaatagttgttgaatggaggccgaggtgagcagatcacttgaggtcaggagttcgagaccagcctggccaacaagatgaaaccccatctctactagaaatacaaaaattagccaggtttggtggtgcacatctgtaatcccagctactagggaggctgaggcaagagaattgcttggaccggggaggcagaggttgcagtgagccgagattgcaccactatactccagcctgagtgacagagtaagactctgtctccaaaaaaaaaaaaaagtatccaaaaccctgacaacaccaaatgcttatgatgatgtggagtaactggaactatcattgactgctggcaggaatgcaacatggcagtgtcactttggaagacagtttggcagtttcttacaaaactaaacatattcttgccatgtggtccagcaatgacactcattggtacttacccaaaggagttgaaaatttgtgttcatgtttatagtagctttatttttcattgccaaaatttagaagcaaccaagatgtccttcaataggcgaatgaataaacaaactgtgctatatccagatggtggaatattattcagcaataaaaaagagctattgagccatgaaaagacgcagaggaactgtcatgcacattgttaagtgaaagaagcccatctgaaaaggctacatactatatgactccaaatataagacattctggaaaaggcaaaatgatggagacagtaaaaagatcagtggtcaccagtggttcagaaggagggagggatgaataagtgtgtattagtctcttctcacactgctataaaggaatacctgagactgggtaatttataaagaaaagaggtttaattgggtcatggctcagcaggctgtacaggaagcataacacaagcatctgcttctggggagacctcaggaagcttccagtcatgggggaagatgaagggggagcaggtgtctcacatggcaggagcaggagcaagagagagagaagggggaggtgctacacactttttttttcttgagatggagtcttgctctgtcacccaggctggagtgtagtggcacgatctcagctcactgcgacctccgcctcccaggttcaaccaattctcctgcctcagcctcccgagtagctaggactacaggcatgtgccaccacgcccggctaattttttgtatctttagtagagatggggtttcaccgtgttagccaggatggtctcgatctcctgacctcgtgatccgcctgcctcggcctcccatagtcctgggattacaggtgtgagccaccgcgcccagcccaccacacacttttaaataaccagttcttgtgagaactcattcattacttcaaggacagtaccaagagaacactgctaaaccattcatgagaaatccaaccccatgatccaatcaccccccaccagtccccatctctaacactggggattacatttcaacgtgagatttgggtggagacacaaatccaaactataaaaaggaggaacacagaggatttttagaggtagtgaaactattctgcaggatactgtgatggtggatacatgttattagacattctcaaaccccaccgcatgtacaacacaaagagggaaccctaatgtaggctatggactttagttaataataatgtatcgatattgtgtcatcaatggaaacagatgtaccacataagtgcaaagtattaataataggggaaaatggtgagggcatgtggggatacacaggctctctctgtacttgctgatcaatttttctgcgaacccaaaattactctaaaaatgtcttttgaaaaaatggaattagggaaggtcagaatgccctttgatgaacaatcactgtttgggcatttgaattaatatcctgacggacagcaactagagccctttcccaggtatactgtcagatctggttgtccttgactttcccatgatctcttcttgctattaagccttactaccaacacactggggtcagctccctggacacatgagcatgctgattgaagagcatcttgttttattagaagcataagttctatcatctgttctccatagtaaagaggggtctttctagcttccaagtatagcaatgaattctggatagaattgtatctggccctctttgtgaaattccagatacttgggggaatgtcctgggacactggaagaaattttttttttttttttttgatgagatggagtctcgctctgtctcctaggctggagtgcactggcgtaatctcggctcactggagcctctgcctcctgggttcaagtgattcttctacctcagcctcccgagtagctgggattacaggcatgtgctaccacacccagctaatttttgtatttttagtagagatggggtttcaccatgttggccaggctggtctcgaactcctgacctcagatgatccgcccaccttggcctcccaaagtgctgggattacagggatgagccacgtgcctggccttctttttttctttttgagacagtttcactcttgtcacccaggatggagtgcagtggcgtgatctcagctcagtgcaacctccgactcccaggttcaagtgattctcctgcctcagcctcccacgtagctgggactacaggcatgcgccaccacatccagctaatttttgtatttttaatagagacggggtttcaccctgttggccaggctggtcttgaactcctgacctcaagtgatccacccacctcggtgtcccaaagtgctgggattacaggcgtgagccactgcacgaggcctgataaatttcaatgatttgactgttctggtggatgaaggccttggatatttctccttgtagggggaatcagttgttctgaagaactttggtgtttgccttaagatgatgagtagaagcttctctgtgacaactgcatttcacactcatgaaaacattccagtaatattaaccacgtggctcttgtaatcttaaaaagtcccatattgcttcagcaattttgtcaagggggttgctaggaaaaaaagggaggggtggcagaatgtcaattttctttagggtggcaataagctcagctaagattgtacatttctcagattccttgtagtcaggggagacctttggcaattctggctaatgagaagtaagcagatgttacagggtggggcttccaggaaagctctttaaaagaagacagaaaaaaaaaaaaatgttggtgtcaggggaataaattggcacgcacctttcatcatctgttgtcccatttcttctccctggaatgctgatgcaatgctggaggcagagtcgccattttgtagtcatgcggtgactgtgagcacgaaggcacaaactaagcagggaaacaaatagctagaagaaacatcagttatagacactgttgtgcagctgccataccaatcctgaatggcttaccacagcagccctttacatgagaaaagcaaagcccctaatttgtgtaagttaatattttgggagtttctgttacttgcagtcaaacccaacatctaactgaatcagaggtattttcagtctacactagtggttgagagtatggactttgaggtctggcagacctactgatatgttgagctatgtgaccttggacatactgcctcacatttctcagatgcttcatttgtaagatggaatcaacaacagtactaaccactgggttgttttaaggataagttgatatattttaagagctaattagctcagtgcctgacacataccaacaactgactagatgtagatggtagagcgaaactgaagttgccttccaatacagatagagggtgcgcagttatgtacaagaagttttaaaactagggcacaggctgggtgtggtggctcatgcctggtaatcccagcactttgggaggccgaggcaggaggatcacttgaggtcaggagtttgagaccagcctggccaacatggtgaaaccttatctctactaaaaatacaaaaattagctggatgtggtggtgggaacctctaagcccagctactcaggaggctaaggcaggagaatctcttgagcccagaaggcagaggttacagtaagccgagattgtaccactgcactccagccttggtgacagagtgaggtcttgtctcaaaaagcaaaaacaaaaccaaaactagggcatgatttggcagcactgtgtcttggacactgaatattatacagctgctggacttcattgtcatgtgaaaaatcaaggtcatctgatgctaagtggatctggccaggcctaccctcagactggtattccctctctctgccccttctaggggtctatggctacagatcattgtaggaaaactatctgactcaacatatagccctccttactggctaaggagaattaggcagttatgcagagaggacaggctgtaatgcatgttccatggccatcccttgactcggttgcacccaaaatggacatccaacacaaagagcccattttgaaggctggccagaggctgaccaagggtcctagtaggaaaatttcttacctctgagatggctgtttcaaatgttctcatctctccttagaactccttccctttctcattcccatctgatgatattgcttctcattgattgtagtgagaaaatagaagcaattggaggagaactgatttattctctcagaactgaatctctgccccttggccctgccttccttcctgttcccagggatgaactggacctgctccttgcagaggagagcacttcaccagggcactgggaccgtgtcctcttgccactctggaaaaccacttctctctctcctgtatcatgacatacaactgtacctttcttctggatcattctctatgcaaatgagctctaacctctccatcttaacaacacaacaaccttctcccttgaggctgagcccctccctgctcccttctcactgctgtgcttccctttacagccacacacctggcctgtcctcactgttctgaaagtgcactcatcaaggtcaccagtgactcttttgttgccaaatgcaatggccagttctgagtccttggtttacccaaacttcagcagcatttcacccaaatgattactccctttttgaaaaactgtctccacttgctgtcttcagtgtgagaaatagacaataaccaatattaatacctttataacataatgtgaactccattatggtgagggctttatttcatttacagctatattcctagcatccagaatggtgcctgttacatataaggcatgcagtatatttgttgaatggatgaatctggatcagaggtgagcaaagtgcagatcacagaccaaatctggcccattgcctgttttgtatataaagttttattggaacacagctatcctcatgcatttgtggattgtacaaggctgctttcacacatcggcagagttgaatagctgtgacagtgactgtgtgacctgcaagggcaaacatatctactatctggccttttacagcaaaactttgctgacccctgatttagataactacttcaacttccactacatgctgtgtgggcaagaccctgaccccacatgaccaatgagagaaagttcacatggaagaaacacagctgcctctttcaccaggagcattctcaggatttgtccatggccaagggctgagaaggactctctatgtaaatataataaaagggtatggggtgaagatggaagcaaaaaaacaattaatccgtattaataagaaaaacattcctgtgcaaccattttatatcatgcactttgcatatatgtttcactgaatgctcctataatccagtgaggcaggcactgtcatttccattttgcagatgaggaaatgaaagcaaatgcaagttaaatgttttgctgaaggtcacagagctacagaatatcagaaaaggggtagctgatgccagtaccaggaatagacccttggggcagggagcagctgtgataaccacaagcacacacagggttgtgatgacatgcaagtgctgttcccagtctgcccatctgtcttgggaaatcaaggcctaggaagatggactgacttgcccaaggccacctggccgtggtaaacggcacagcaggacttgatctcacagtctggctttagactcagttcctcactactctcctgtaatgcatgacaggtccttgatgaatagccgttaagcaaataaacgaatttgaaggcaaatttgtggaatcccagccagtgcctctgcctccaccctgcagaggccacccttctaaggttcagagggctcagcagcatctgcttagagtagagctggcaagaagggggaggtgttgtcgtagaaattactagaacatttcaggatttattcattctctgtctacatttttgtctctcttggggcagtgcccatttccctggggaaactatcatttcaataactggtgataacatctgtctttaaacttgtgaaccacttgtagagatgtatttcagaagggaactaaggcttccggttttagggcagtttcttccaaaatcattgaagttgctttcttactcaatcctggctacaggtttgaattgtgcaacaaaatgtatcccccaacagactactgtacaaattatgccctccattgggaggtgaatttttttcccctgtcaaagttacttaacttaaaaaaattgggatttgatgtatttctctttcaaaatcagataaagccatcaattttatgtacatttggccagctctcaagagtgggacaggggtattctagagaggaagcattctctgctcagtaaggcatgttttcgattttctggttgtggggtaaaattaatgatatctttccttctgtattaatcaactcagattgccgtaagaagatactatagattgtgtggctaaaccaacagacatgcatttttcacagttctggaggcaggaaggtgaaggtgccagctgattggcttccaagtaaggcctctcttcctgacttgcagatggccgccttctcgctgtgtcctcacatggcctttccttagtttgtgcatatagcagggctggggtgggagttgggagtgagggagagagagaggaatttctcttcctcctcttataaggcaaccaattctattgggttagggccccacccttctgacctcatttaaccttaattatctcctaaatgccctatctccagatacaatctcactgtggggattgaggcttcaacatataaattttgaggacaacacaattcaatccctctcctgggaccctgagaaccatcccatgtgacctgatactgtgaaagtttgcaagctgactgcaaatattgttcaatctggttttgagaccatgattaacatgcttccatgtaggaagatcccaaactctattctttagtttcaagtccttgcacacatgaggaaaaaattgtgtgcattgtgcagcagttagtagtttttctgaatattccatacagtaataatagctttgcttaaaaggtaccagacaccctactacaccttttgtatctctaagcattttgtattatcttttaatccttttcacaaccttgtgacagatgaaacagttattattattcccagtttatggatgaagaaactcaggtttagataagctaggtaacttgctcaagagaacacaactaggaaatgactcaattcaggtttgaacccagcactgtgtaattccaaggtattctcctaaccacactccgtgtctcccagttgttgatgaaacgtatacttccaaatacttcattccacaatcatcaggaatgatggttcagcttaatgctttaaaattaacctctggctgagaagaagttaattcagtttggtttagttcttgcttttattcagatttatcttatccatgtattttggttagtaaccattgaggcaaagggatattgctctgaaaagccactcctaacttaaaacattttgcttttattagaatgtcaaaaaggtttttggtaaaagacacttctaaaaaaaatcagtggagaatggtaatggtgccatttcccattctgtaatttattttaatgactgtcttctctcatctgtgtcgagagtgtcctaaggcaattttatgggtttttttaattaaaaattttgctcacttttcagaaaccaaaagagaaaactatcacagaaaatgtttttctcttctgtttgttctgtgtttcaagtactatgtttctatcatgattaaagtcattttttttttgtcaaagaagtccagctgtttgaaccatctgaaccggaagagtggaaaggaattgaggtgtttctccctccttctagaaagttaagggtagcagaatttgaacaccacaagcctcagagagaagtgacagaggtgaggacagatgacctaattggttattcctagttattagaattaggcggcttatctcttttttcctaaatgtttatacctatgggagaattttccagcttcctgggaacacaattttttttctttctcgagagagataagtgtgtttactctctgcagtatctattcaactgcaaggaagtattgcagggcagaagcaagctcttcaatacaaagcagctcatttcaaagcatccaggcttacttttgttgtctgtgcctattcatcctataaactgctcttcatcaaaatagttaactctcccctgttctgcccccatccactcttgagaatgaggggatggcaggaaaccatcaatacaaaaatctatgtggcaacaacaaccatttggcctgttgagaggtgcttatgcagaaagaaacacaagaaaacaaagaggaagtgtgtgaacttctgaccctctttgccacatgccatttggtgggtgggtggcatgagcaagcatcctgcagtgggtgtttttatgggaccaagtgacaaagagccaaacagggtgagaactcatgagtagcaagtggaaaactaccaagagctgtcccatcactcctgcaacaaacttcacctcgctcaagggagggtagctgaggctcccttctccaaatcctgcaagacacaggcactctgatggggccagctcttcactgcatgggagggcttttgttgaacagtgagtttctgtgccccgctccctttttggccccttttgcccaagtggagtgacactttatcaattgggggggcaggcaacgaatagaggatattaatgattgctaacggacccccatctgctgttccgcctgcagcttttatgaaacccacattttaaaattaacacatggaaaagacagtcttagctcaaaagtgtcagctaggaaaggaattcaattgatccccactctgtagttgtctgagtggatctgctaaatgtggacttgcaggagggcaagaattgttctgaaaactgatatgagaacacaggccagcctgtgcagtggctacatcaaggaattccagaaggttttacctttggatttaaatgttggctttagcatttggtggaagttttctggggagatgagaatatgataactcagggaggaacagtaaaaattggctgaggacggctaatgccctggggttagtggtttgcgttttcttagaacatgcaggaaggcagggggcttttctagaaagcactctgggtctgaagatgtgagagctgtgattgagctgggtttagcctttattgtgacactctgggcaagaaacttaacttttctgagtgtctgttaaaaggtgacaataagacccacatctctcaaacgagacagtgggtgagaaagtgatttgtaacacaggacattacaataaatactacataaattttttgtataataaaacttgtaaataatgtaggctgtcaatgcatccgtttgttcaaggaacatatatctacaaggagctgttgatatacaataaataacagactcagtctctgtcctcacaaagtttacagttgacactcacacgcaaacacaaaagtcctttaaagtgcggtaagtgctatgatgggtaaataaaggcttcatagaagtttataaagatgacgcctaccctggtcttgggaaatttccaggaggcttccaggagggagtaatgttcaagccaggcttaaatgccatctcctcggtgaggactctcatgtactgcttagttaaaaacttaaccccttaccctcctgttttatttttctttaaagcactagcgctatctgatgcactccctgtattcacttgctgatagtttgtgtctgtctctcttaaccaaagtggaagctcatgaagtgagatatttttctgttttgttttctaccgcatcctctgcgcctaggataggttatgacacatagcaggcactcaagatatgtttgtggaataaatgaatataaaatgtaagtgtgatttgggcagccaggagagctggaaataatattccaggagcagaaaaccataagcaaagaccaggaggccaagtgtaggtggcttggtttggctggagtattaacatgtgagggtggaatatggagagatcagactggggaagtaggtaaggccagatggtgaagggtcttgtaagccaagttcaagggcttggaccttattctgagggttgtaaggacagttgaagtatttaatatggaagtgataagatctgagtttccacacagcttgggacagggagaccatggggaagcttctttcctagtcgaggagcaagacaatgatgacctgaactaggactatggcaatggggagagggattagaagggattggaagggacaggccctgacagttgattggcagtggggaatgaaggtgagggaagctcagtgatcgggtggaggcaattcaagtgacctcatgggtggtggtccattcatggacatggggaagacagcagcagaagcaagtttgggatgaagatgatgagttttcagtgtggaacttttagctgagtatgttttgtgagcgtttctgtgtgagtcagtctagaaatggcaactgaagccatagatgtttggaattttccagctaagagagaaaaggagtaggcttaggaaaagccccagaagacactaatggcagaaggatggacagaaggagagaagcccaagaaggaatgtgggaaaaagatttcgagggggtctaaggaggaccaggaatagatggtatcgcaaggagagaagggcttgccaggtcaagttagatataaaagtgttatgggtttaaaatgtgtcccccaaaacgaaatgtggaagttctaatctctggtacctgtgacctcatttagaggtcatgaatttgcagatataatcaagtaaagatgaggtcatgctagattagggtgggccctaatcttataaaaagagggaaatttggacacggagacacaagcaaggcaatgtgaagacagaggcagagtttggcatgatgccaccataacccgaggaaagccaaggaaggagggcaaccaccaggactaggaagaggcagggaagtctccctcccgagagccttcagagggagcgtggccttgtcaacaccatgattttagacttctggcccccaaactgtgagacaatatgtttctgctgtttcaagctacctggtttgtggtaatctgttatagcagtcctacaaaactaatacaggaagggaaagtatccacagatgtagcaacaaggaagtcataagaaaccgtggtaaaactagcttcagtctagcagtgagggagactcagactggagagggtggtaaagctaatgacagggggagaaatggagaccaggtctaagcaagtctccccaagcctggctacgcagggagagagagaagtctacagtagctagaagatgtcaatgaaatctatcgaacgatctaccaaatgatctatctatctatcatctatctatctatctatctatctatctatctatctatctatctatcatctatctatcttgagattttttttttttttttgagacagagtctcactctgtttcccaggctggagtgcagtggtgtgatgtcagctcactgcaaccttctccacctcccgggttcaagcaattctcatgcctcagcctcgtgagtagctgggaattacaggcacacaccaccttgcccagctaattttttgtattttagtagagacggggtttcaccatgttgcccaggctggtctcaaactcctgagctcaggcaatctgcccacctcggcctcctaaagtgctaggattacaggtatgagccaccatgcccagccctctcctctatcgatatctatctatctatctatctatctatctatctatctatctatctatcttctatttatatctatctatctatctatcttctatttatatctatctatctatctatctatctatctatctatctatctatctatctatcttctatttatatctatctatctatcttctatttatatctatctatctatctatctatctaatctatctatctacctacctatgtatctataatctatctatctatccatccctctaactacctacctattttaagtaactaattaacatatccatcaccttacatagttactatttgtgtctgtttttaagtggtgagaacacttaatgatcaactctcttagcaaatttagcatattcaatacagtattactcactatagtcactatgctgcacattagctccccagaatgcactgctcctctataactggaactttgtaccctttgaccaatatttctccatttctcccactgccccctcagcccctgacaaccagcatgctactctctgcttttatcagttgcacttttcttttggttgtttttgagacggagtctccctctgtcacccaggctggagtgcagtgacgcgatgtcggctcactgctacctccgcctcccggtttcaagcgactctcctgtctcagcctcccgagtagctgggagtacaggtgcatgccaccacgcccagctaatttttgtatctttagtagagaccgggtttcaccatgttggtcaggctggtctcgaattcctggcatcaggtgatcctcggcctcccaaagtgctgggattacaggcgtgggcatgccggcaatgagttccacttttttttagacgtaagtgagatcatgtcatatttatccttctgtgtctggcttatttcacttagcgcaatatcttccagacttatctgttgttcaaaatgttgggatttccttctctttttaaggctgaataatattccagtgtattcgtatgtgacatgtatgtatcatatgttctttatctacttatctgttgatggacacttagtttaatttcatgtcttggctattgtgaataatactgcaataaacatgggggtgcatatgcatcttcaagatattgatttcatttcttttggatatatccctagaagtgggattgctggatcatataatagttctgtttttagttttttgaggaatttctccacagcggctgtactaatttacatttccaccaagtgtacaagagtttccttttctctgaaagagaccagtaccagtccatggcctcttaggaactgggctgcatagcaggagttaagcagcaggcaagcgagtgaagctttatctgtgtttacagccactccctattgctcacattagtgcctcagctctgcctcctgtcagatcagcattagattctcctaggagggcgaaccctactgtgaattgcacatgcgaggaacctaggtggtgcactccttatgagaatctaatgcctgaagctccgtcactgtctcccatcacccccagatgagaccatctagcaggaaaacaagctcagggctcccattgattctacgttatactgagttgtataattacttcattatatattacaatgcaataataatagaaataaagtgcaccataaatggaatgcgcttgaatcatccccaaagcatcctccaccctggtccgtggaaagattgtcttccaggaaactggtccctggtgccaaaaaggctgaggaccgctgtttttgacaatagtcatcttgacagtgtgaggtgatatattattgtggttttgattcacatttccctgatgagattttatttttcatataaagatttgatcagatttaaatgctgatgggaagccattggagaggaaaacattttctgaaaatacagtcatgtgtcacttaacaagagagatatttgttgctgttgttttttctttctttccttccttccttctttctttctttttttatttttttttgagacagtgtctcactctgtcacccaggctggagtgcagtggtgcgatctcggctcactgaaacctccgcctcctgggttcaagcgattctcatgcctcagcttcccaagtagctgggattacaggcacccgccaccacgtccggctaatttttgtatttttagtagagatggggtttcaccatgtgggccaagctggtctcaaactcctggcctcaagtgaaccgcctgcctcagcctccaaagtgctgggattacaggcatgagccaccatgcctggccaacaatgaaggcatgtcctgagaaatgcattgttaggtgattctgtcattgtgtgaccatcgtagaatgtatttacgcaaacctagatggtataaggcactacactcctaggctgtatggtgtatcctactgctcctaggctacagacttgtccaacatgacactgtactgaacactgtaggcagttgtaacctaatggtaagtatttgtgtatctaaacatagcgaaacatagaaaaggtacagtaaaaatcgggtataaaagattaaaaatagagtgtaaaagataaaaaatggtgcacctgtatagggcccttgccatgaatggagcttacaggactggagtttgctgtaggtgactctgagtgagtggtgagtgaatgtgaggggcattactgcccactcctttataaacactgttatagactttatgaacactgtatggctacactaaatttataaacacatgaagtcattgtgctacaacattacaatggctagcacgtcactgggcgataggaatttttcagctccattatggtcttacgggagctgtggtatacacagcccgttgttgactgaaacgtcgttatgcggcacttgactgtataagaaagggaagatgtagtcccagctactcgggagactgaggcaggagaatcgcttgaacccgggaggcgcaggttgcagtgagccgagatcacaccactgcactccagcctgggcgacagagcaagactctgtctcaaaaaaaaaaaataaaataaaaataaaaataaaaataaaaaaggaagaatctgtcagtgagcgaggtgtccaaaaggggtaagtacgggatccagagtagagtactggggtgcacaggtgggtctggaggtctggctgcaggaagcaaagctggttcctgccggacagctctctgggagcccgagtgtaaggccaacttaaaggaaggcagagcaggtcaactggggggcttgagaagtgaaaacaaagtggtccactggccagaatgggagagctgacaaggtaaacagaagattctgaggcagacacacgtagcccagatggaagcggggttccgcagacattctgactgcccctcctacgcactcacttttcctggctgactaagccccagggtcaggaatgcaccactgagagaaggtagcccctctctctttctgccggatattggcaattctgctgtaacaaacacccccaagattttagtggcctaaactcatacatatttatttattgttcactgggtcagcatctctcctcaagtgcagattcagggacccaggttcctttcaccttgtgatgctgccagatgtatgacttacagaagaagcgagagggtgggtcattcacacggagttaggctcatccctttggtgtacatctcattggccaggcccagtcatatgccctcaactaacagcaagggaagctgggaaatgtagttttcctgcatgctgaggtggaagaatgacgtggtcagcacagcgcaagtctctgcctcagcatgtgatacctggaattatggcagcatggtacaaccatgagggcaactaatcggacatctgaggatggaagcgggggaagatgcaaagaacctgggtctttggtgacgtcgttaagcagctgatgtaatcagcctggggttttcctttctgtagattttttttttttttaaggacagataatttttttctactgccaaatttttttgaattggaaatttttctggttacttacaaccacaattggcatcattcaaaaaccattaatttaattacattacttaaacaacttattatacttagagtattatatttcatcatagggaagaagtggaacagtatctagtttattgcttagatttcaggaaactcagcttgtttattcttgaccccagtgggaaaggggattcaaaatactttttgtctcagagttggggtagaattgaatatttgcatgacatttacatcctgtaagaaacaatcaagaatatgaccgtgctgattggcattttaagcagtctgtcattgactgaccgtaaatatgtgacctgctttacaaacctctaattcttcattcttttatttatcaagtacttttgtaggaccttctacatgcgattgcttctatcttcatctgctaggttgtgcactactgaagggaggtgtttctcttatttacttttatacccgtgttacctagcaaacaggattccacacatagatgggacataaataaatatttgttgtcagtcgctgtggctcgtgcctgtaatcccaacactttgggaggccgaggcaggtggatcacctgaggttaggagttcaagaccagtgtgaccaatgtggtgaaaccccatctctactaaaaatacaaaaattagccggttgtggtggcgggagcctgtaatcccagctacttgggaggctgaggcaggagaattgtttgaattcggggggtggaggttgcagtgagctgagatcacaccattgcactccagcctgggtgacagagtgagactctgtctcaaaaaataaataaataaataaattgttgaatgaagtttgatctgatcttcctggtagaattgaaaatgagtggggtttagacagtgttggaatggaattttgactttataactctcattaggtgattttggggaagttccttaatctatctgagcctcagattcctacttattgaggataacaatccacaagacagcatatgtaaagtgtctagcttatggcccggcacaaaacaggcccattgtaaatagcggtctttcttccagtatgttatatagatcaagtcgtttcaatagatgaatactctaaaaactcaaattttatggtaaacagttaagaaagtgaatccactgccagaaaattatgtaaagcacattgcaaattatatttggattagtttctctttggatgatccatgacagggttttctgctatttgtgaagatagttgagagtcaacaatctttcattttcactcacatgtacccagagcatctcccaaacacacaaatgcaaagaatggaattttctctccaatttccagatgaggtatttatctttgcggctgagctaaaggatagcttaaaatcgaatctcatgctaacactacgggctcgaccaactgttcttcttagtttaagtgatttctctcataactgagctgggcgacgcagttttatgacaaggttagacagcagtaattcattcctgttggtgttggctgtgcaggtgaggcagatggcatggcttgtgcttattttgtttggattagagagcgctgcactcactcagaagtcctcagttgagtcgcagatctgtgacttagtcacactgtgaccttgggcgtgtgagttcaaacacgccctggtttcagtttcttcttctgtacaattagggctttagaccaggtgttctggaggtgtctcgaaccctaaattctatgataggggtttctttgctgcttccttttccccttatttatttattatttcagtattcatgtctcaaataatttaaaaaaaagaacaaaagcatgtgtatgcacatagtcattactctattatttttccatggggggaaaaaaaggaaatagcctaagtgtccaatatgacagaaaaggctaagtaaatgataacaaatcaatcaatttggtgaaatattatccaatggtcaaaagggttgtttatgaagcctccctagcaaaatgggaaaatgtgtctgtctgatgttaaatgaaaaagacagaagataagtgatccctctgccatgataacaacactctaaaaaatacacagaaatatgtgtggattctagaagggagtgtgagaagtggaaacagttgatacattaaaaatatgatgattttctcacttctagtgggaggaaggaagtgttcaatatatttcaggtttccctttgggtgtcttgttttgtacatttatctaaggtgggctaattgggttaggtgccttaagtgctggaaggggctggggaatagctaacctcaagcaggttagagtccagtccttctctcttctgagtcaaagctccttccataataagagaggaaaatgatcaatgtgttcctcaaatagattgagctttgctttttattttcctgcctccctccactgctaccttctccttctcctccctcccttctctctctctctccgttttgtttgttgttatttacctttcccccaacacttattttcccattggagaaaaatgtacatataatgaaatgcacagctgtaacgcgtacagttccctgagttttgataaatgtatacacccctgtaatcaaccctcccatgaagatcatcaagatacagaacattcctatcacctcagaaagttctctgtgttcctttccagtaaatcacctgccccccagacaaccagtgttctgatctctatcaacacagattagttttacctgttctagaacttcatctcaatggaatcacatggctggcctcttttttttcggtctggcttctttggctccacattctgtttttgagattcgtctatcttgtgtgtatcacagctcattcttttttattcctagttagtatattcctgaatgatggctccaaagatatccaggtcttaatcctggaaactttgaacgttatgctgccaaagagattttgcagatgtcgactgaattaaagatctcgagatgaaggattagctcggattattcaggtggtccctagatgtcatcacaagtaagaggaaggccaagggagattgactacagaagaagagtagacaatgtgatcacagaggcagagactggaggagcgtagggggccgccagaagacagaaaggccaggaaatggattctttcctagagcccccagagggaaccagccctgccaacaccttgactttagcccagtgaaattgaatttagacttctgacctctagaactgaaaaagaataaattcgtactgtttttgttgttgttatttgagacagagcctcccaggccggatggagtgcagtggtgtgatctcagctcactgtaacctctgcctcccagctcaagggattctctgcctcagtctcccgagtagctgggattacaggtgcccaccacggtgcccagctaatttttgtgtttttagtagagacagggtttcatcatgctggccaggctggtctcgaactcctgatctcaggtgatccacctgtcttggcctcccaaagtgctggaattacaggcatgagccaccacgcctggcctgttttaagccactaattttgtggtaatttgttatagtgacaataggaaactaatataattttaaacacaatttgtttatccatgcacctcttgatacgtggggttatttgctgtctggaactattctgaataaagctgctaggaacattcttatgcaagtccttgtgtggacatatgttttcatttctcttgggtaaatatacctaggaatggaatttcagaggcatacagtagttatgtgtttaacggtataagaaactttcagttttcccaattagttttaccattttatacttaacagtatgagacctgaccatcttaaaaaacacatgcacacaaaacaggaaggttggggtcattcaccccaaagggtaagggactggtgggagtcaatccgtgtgtgtgttctggatgattctagaccctgactgtacttccagagtctcagcatgagctgtagtacagatttatgcctagattagtttttctttattttctttcttgaacaagaaatggttcacctgatacaccgctctcatcctcttcttccctcccgtgttcctgtgcttcctatcagcacgcactgtcctttccctgtgggcggtagtcacacccccaaagacctggacaacctagggaacaggagccagtgagtctagacctcagagtcctgagaacgacacagaaaacaagtctgcagtgtgctgcatgcctctgccgtgtggggcagtcaaccatattattcttcagttaatggaattttctttctcctctaagtaggaaaacaccagtagctcagatgccacccactgcagtagttgataaaacactcaaagaaaaggaagcagggagaaagaggaaaatctccctggatctgttttgttttgttttttcttttactttttctttttctttctttctttttttttttggtgggcagtgaggtgggggttcctgggtggggtgtagcagggagccgttttgttatttttgctttttttttcgcctaaagaaaatttgccaggtccccttccaattctgatcccactagattccagaagtcttctgaggttaagctcaaggacaaagagatggttgttttccaggtgcaattttggtgagccaagctttgactcccgaaagagggtctggaatttggaaatcagctggtttgtccccccttgccccccagatttctcaaacttgttcagatcatagatctctcaaaacaaaatggcttatcagctcctctcatctccttccgtttataacacctgcgtagtaataccttgcatagctcactaagcacacctccttccatatgagctgtgttatattgtggtacatcatttggaactgctgagtctatatggaaatcctgatgtactctcgtagaccactagccacactgagagtgttggaaactaaagaccccaggtgtcctttggagccaaggacagttgtcttgtacaagatcagtggggctggacccatccatttgtgagtcctgaagtcgagctcaatgatattgtcttttgcagtgactgaacgggctcccatgccaggcctggctggatgttggcctgggagccctctttgcgcacggtggtacaagtcctctccctgctgtgcagaactaagagctctggaatgtgggcacagcatgtggtataggcacatgcctggtcctctgcaggtttagaacaagtttgcacagacatggagacctcatgggagggacagtgcattgctttgcaaaggaaattatttggacaagccctcagctttcatgccaagcaagaggtagaactactcagttaacccaccttggcatgaaagtgctgccctgggtgtaaaggagacttttctcccaggtatccttctatattggactcataccagccccagacatttgttgtgccaggcatgacaatacatgcttgacctacgtcatcactttatcttgtcaccgtacttggaagggaggtgcagaaacagcagcgcaacttcttccaagtgcctacatttccccatcgccttccaagctaggcatccagagaatctgcaccctgtggttctgggatatgacagcagcagggtgtatgggcatgggcttgtcctctcaggttgagccagtttgcacaggtgtcaacaccccatgggtaccatggtgcagcctagcatcatgaaaagaacaggacatttgggtaaaatgataagaatgtgaatgtgaatcccgggcagtggtgaggatcaaaggtcaaaggggaccgtgagaatgaaggtgctttgtcaactgtcaaggggcatacagatacggatgattcttgctcttggttgggaaggtaacactcattcaggcaacatgagagtactcgtctttagcagaaaatggtacccagtgagattagcacccagcaaggtgggtggtatacagagaggtggtcgtactaatgtggaggctggttcccattgacgaggtggggactcagtgaggagattgttactcaggaaggaggatggtacccagtggggaggatgcgcccaagggggagggtgtgctcagcagggaggttggtatccagggaggatgatggtacccagtgggaaaattagtactcactggggagactagcacccattggtgaggttgtacccattggaaagattggtaccagggggaaggttttacccaggaggaaggttgtacccattggagagactggtaccagggggaaggttttacccagggggaaggctgtacccattggagagactggtaccagggggaaggttttacccagggggaaggctgtacccattggagagactggtaccaggggggaggttttacctagggtgaaggctgtacccattggagagactggtaccagaggaaggttttcctcaggggggaggttgtaccctactggggagattggtaccagtggggaggtggcacccggggggagcttggtacccagtagggagtttgctgcacactgggagactggtacccagtaggaaggttgtaaccagcggggaggttggacctagtaaggagtttggaccttggagagtctcatcacctgatttaggctgtgaagcggactacgggcagaggtcaaataagatagaggtgacttgtgcaatttttcacatttaaataaaaaagcagaggcatggacaaatcttcagtaccctgcccacgttagatgttttagagcatccatttatccatgttggttttagatttctgcccaaggaagcctaaagtcaacattactgtgatcaaatggagctcacatttctcctgcctggaaatacctataattccttaaaacaatgtttcaatttaccacaagtctggtggcatttcaaagtgtaataaaaaacccaccatccttttcctgcctcccactcttggtgttctggagaagactgcggaacacacacggacttttaatcaaggggagacggctcttcctctgttttgtgtacctttgtctttcctggagtagagtgctgtgataaacctacagatgccggtgactcaggctgggtcatgggaagaagtgggcgagtcggagccagatgaatttgtggtgtgctttcctatccagctgacatgttgcagaggttaagtatggtggagttttaggccaatttggagccattcatttactcagtgagcttcatcaacccatccctcacccaccatgtgcctgcatttgcactggtgtttggcaggtacatctcgacctgttaaaatattgaactactttcacactggttgtcaagtaaccactgcctggataccttccaacctccccaagggcttgtgtccattctaattggttagtttctgttattacactgattgctgaatagttgacaccccagattatggaacaattaaaacaaatcctctcccaacaagggggtggcagatgccatgccttcctttccctggaaaattccccatgactctttcaggatgcaaggaggccccaactgctatttttgtttaggtgattgagaaaaccaagtgtggagaagaaactccgttgacgtgataaaaagagcagaattaatatttgctatctctttttctggtgccaagaaagttactggaataattcaaccagataaaataagtagatatgtgactttaaaaagatgaagtttgtacaatgaggcagatgccatctggcccaggaggaatttagtgatggcggcatcattctcattaatgtcagaactgcccggggttgttgtctatttgtacagtctagggagatgttgaaggcaaaattcagaaagcaattctaattctgaggttttcaatcctgaacccacagttgatcaccataggcatgcccatactggaaacctcgcattagtttctgtatttttttcctggtgatatgtgatcaatacaaagtatttgaatacctgatgttacatactttcccccatctcagccaccactaacccttcccctcatcctcctcaagggaaccttcattaatgatttcatgtgctccttttctggcctttctaatgcctatatatcaacctatattttaatgcttaacatatagtgtctataatctgcttcttttcacttactgtatggcagacaacttctgtagcagatgatatggtgtgctctcagatgctgcttcagagtgaaggcactcattccccggctgtcaggaagctgactggtgatgggtcacaggtaagccctttctcaggatttgccattggcaaggttacaccttctctccagaggacaattcacatccaatgtttggccaatgtggagcatagaggctcagtcttccctctgagaagctccccagctccagagtttcctgtgggatcggctgagaccccccgttccacctgcatctcagtttgacttctctttctgtcccctcttgctgccctcattccctcaggtattcattgtaactgaaggcctttcccagtaaaatgccagcccacaaacctccaactcagatgttccccaggaatcagtctaacacaatgctcatcatgttgacatcttcaagcattccactatatagaatctaacaaacaatatgttgagtctcattcctataatcatgtttgatattttctgtttattattctttcttgtttctttctaatttttaatggatttaattttgtttcattttaacagattaatagtttcctttgtatttcttttcctcctggatcaaccctgttcaacagaagtatatcaaggccacatttgtgatttaaacttttctagcagccatgaaggcatgactcattggggatcatcttagaatcctgcttaccacacacgttaaaaaaggtttaaagaagcaaaattagttttaaaaaaatgcgttgttattattttatagagacagggtctcactatgtttcctaggctggtctcaaactcctgggctcaagcaatcctcctgcctcagcttcccaaagtgctgagatacagtgtgagctactgcatcaggctccagattaattttaacaatacattttactggatctaatataaccagaatattatcatttcaaaatatatttggagtaaaaatgattatggatatatatatagagagagtgtattttgaaagccagtgtgtgttttatacttagagcacgtctcagttcgcaccagccacatttcaagggtttgacagccacgtgtactagtagtggctgctgcactacacggtgcacttctagagggttcaaagtttccattaaaattgtattctaggacaccagccaaaatggcaaataaggatctccgaaaattccctcctccataaaagcaacaagaacattatcaaaaaatgtcagaatcaacgttttcagaactttggaaattaaccaaaggcttgcagcaatctgggaaacatttatttaagaaaacagcagaatcttggtaagaacagggagctttgtggcactttaacttgccgtattcccatccccaccctccccagcaccacattagctgtgaaatccaacagcctgcaaaacgacctgtgaccacaggggaaagtccggcagtcactggaagggcttagagctcctcaaggcccattctcggagaattgtcattatttgacctctctggtcacactacttgcaaggctgtttttatttgagctgacttagagctcatccagcacaaataaaagcagccttgagagtagggtcaattattgaacctcacagctgactgaggtagtggataacaagtgggatagacaatgtgctaaccaaaaaacataaaagaaaaagcagaggaatgggatgtccttggagagagtgggcgctttaaaaagttctaacaatattcctgggaatatagaaagccatacaaatgtttagggctgtgtggacacccagtgctgtgtgtgtgcccaggaaatatccaagaagaccctggctctcacctctggccaaccttgagcctctgctgaagcaggaagtgaaggctaagatggagctgtaaggtgcttggctgaatgctgaaggaaacacacgcagaacttcttggtaaagactgagagtcttattggttccagtcatctaaggaagtctttgttgaatcattaaatgaccactaagctaactggtcgagactcactggccacacaaaacaaagaatatacctttatagaattagttcaggaaagtcaccaaccatccaaccaaacaataccaattaaatagtaacaacaacaaacccagggcaaaatctgatttccagagttgctatgttatattgttttaaaagtctagtttttaccaaaaattatgaaacacgccaagaaacaagagagtctgtctcatatgcagggaaaaagacactcaatagaaactgtccccaagagggcacagacactggattttctatacaaagacttaaatcaactatgttaaatatgttttaaaaaccctaaaaaactaaaggaaaccgtggctatacagggaaaaatgtctcatatacagaaactcctaaggaatccacaaaacacaagatcaatatacaaaaatcaattttgtttccgtaagctagcagtgaacaacacaaaaatgaaattaagaaaaacaattccacttagtatccaaaaatgtttaggaataaatttaatgaaagaagtgtaagacttttaactgaaaactctcaaacattggtgaaagaaattaaagaagacctacataaatggaaagacattcctgtgttcatggactggaaaatggcaattttctccaaattgaaatcactataaaaattccagatgctgggctttttttttgttttgttttgttttagaaattgagaagctgattctaaaattcatatataaattcaagggatccacaatagctaaaacaatcctgaaaaagaataacaaaattggaggactcacatttcccagtttcaaaacataagctacagtaatcaagactgtgtggttctgacctaaggatagacatagacaatggaatagaattaaaagtccagaaataaacccatatatttatagtcaattgattttcaacaatagtgccaggacattcaatggggggaaaatagtcttttcaacaactggtgctgagataactggatatccacatgcacaaaagaagaaattggatcccttaccttacaccatatacaaaatttaactcaaaatggatcaaagactttgctgtaagactcttaggagagagcatagatgtaaataatcattacctttaattaagcaagtttcttggctatgacactaaaagcataagcaatcaaagaaaaaatagataaattggacttcatcaaaattttaaaaatctgtgcttcaaagtacacgatcaagaaaggaaaaagacaagtcacagagtgggaggaaatattgttgaatcacatgtctgataagggtctagtatccagaatatattgttggggctcagaaaacattacccccaaataggacactttgacatgaagcaacctcgaggtctctctgacctccctggtccctgcacccgactattcctctgtctctctcaaagcacagaatgtagttgttcactgaaattcccttatctacctagacactgaacctactaaagagaaacacaattgccttccctgaaatttaactagagaagaataaactcataacacagaggaagagattgaaaattaaacaccagacaaactttgtcccaaaccactgtcttctctctgtcccattcaatttccaaagaaaactatttactaaccattgtctgagcattagacccattcatttcccctaaaaatcatttactatccctcaaatcagccacatttccccatgttctttttccctatgaagaagaatatataagcatgtgtatccctttgggttactgggtaattattctcctgcaattccaatgtgatgtgttaaaataaatctgtatgcttttttcttctattaatctgcctttgtcagtttattttcagcaaaccttcagagggtgatgggggaagagttctcttcttccccctataatataaaggactattacaactcaacaattaaaagacaacccagattaaaagtgggcactatagtcgaatacatatttttccagtaaagatatacaaatggctaatgagcacatgaatagatgctccatatcattagtcacagggaactggaagttaaaaccacagtgagatatcatgtcacattcactagaatgactattatcaaagacagtcaataacaagtgttgccaatatggagaagctgaaccctccatacattactggtaggaatagaaaactgtgaagctgctttgggaaagagtttgacagttcctcaaaaagttaaacatagagttttcatgtgactcagttgttccactcctaggtacatactcaaaagaaatgacatttgcccacaagaaaccttgtatgtgaatgttcatagcagcattattcataatagctagaaaataaaaacaatccaaatgtccatcaactagtgaacagataaacaaaaggtggtgtacctatctaatggaatacttttcagccataaaaaggaatgaaatactgattcatgatacaacaggaatgcaccttaaaaacactgtgctaaattaaagaagccagacatcaacagccacatactgtatgattccatttacagtagcccccccttttctgcattccaagatccccactggatgcctggaactacagatagtacccaaccctatgtatacgatgtttttcaatctgataaccaagatggctactaagtgactaacaagcaggtagtgtatgcagtatggatatgctggaccaaggatgattcacatcccaggtgggacagcacaaaatttcatcatgctactcagaatggcgtgcaatgtaaagcatatgaattctttacttctggaattttctacttaatattttctgatcatgattgaccatgggtaactgaaactacagaaaatggaaagtgcggataacgggaactattgtatataaaatgtctagaagaggcaaatccatagatacagaaagatttgtggctgccaggacctgggcgtggggagacaggaaaatgggagatgactgctaatgggtgtggaggtgctttctgcggcgattaaaatgagataatgataatgtttgcacaactttgtgaatatattaaaatgtattaaattgtaaactttaaaaggtgaattttatagtatatgactatatcttaatttttaatatgaagtattttttaaataaaagaaaatattatattctatcaggcattcttaaatttttaacaaatctattttttatttctctatcgacatcaaggttgaaacagcatatgtaaccctccttcccttctatcatctctgcaacgcaagaaacttaacatgctttcattctcctagtcacctctctacaatctagattttcttgttgatgatgatgatgaaaagaatctgtaattattacttgttgaatgttaagtaccatgtatcatgtttattttataagcattatcttatttttcccaaggtcttaactactacctcaaactacctctcagactgtttagggatttttaaaaacattatgtcttctattttaagcctcctttaaacaattttaaattaaatggtacaactactctgtcaatgaattttttgtattggtttcttaaagccccttctgtagcttctgtgataccacataatctcagtgttcttttgcctcttggaggttccctctcattctcttttgcttagttgtcctcctgttcgtcacccctaaatatcggggtgtccaacactgagtcctcagagtgcttctcttttcacttacctgacaccttgggtgatctcatctggtcccatggccttgaacagcaccctttgcagataattctcaaatttgtatctccggtcttaacctctctcctaaactccacctgtcaatttgacatgttcacttggatgtccaataggcatctcaaacgtaacatgtccaaaatcaaactcttgattctgtccccagacttgctcttcctccagtgttctccatctttgtgaatggcacctattcacccagttactcaggttgaaaactttaaaatcaaacttgaatcctctctttctctcacgctctccaaattcaatcctgttggttctaccttcaagcacatctccagttcctcactaatactgtcctggcccagagcaccaccacacttctggaataccacagtaggctattttttttttttttttttgagatggagttccacttttgttgtccaggctggagtgtaatggcacgatttcggctcactgcaacctctgtggaataccacagtaggctctgaccagtcttgattctttccttcttgcctccctatcatcttgtctccaaactgaagaccgagtgatccttgctatagtttctcatcacatggggtctgcagaccttaggcgatctggctcctgggcaccactcccattttacttctcactgttttctttgcattatcttcactccagccacactggccttcctattttttttgtttgttttgagacagaatcttgctctgtggcccaggctggagtgcagtggtatgatctcagctcactgcaacctctgcctcccacgttcaagcgattctcctgcctcagactcccaagtagctgggattacaggcacacgccatcacccggctaatttttgtatttttaatagagatggggttttgccgtattggccaggctggtctcaaactcctcacctcgggtgatccgcacacctcagcctcccaaagtgctgggattacaggcgtgagccactgcatctggccaaattattattatagctcagttttctaatctgtgtaatagggataataataataatacttactccatggtgatgttggagtgattaaatgagacactatatctagatttgttcagaatagtacttgaatcagagtaaatccacaataaatgttggctattattattacaattacacactggacttttttccttgatgtctttattctgcttcttctttcttaatttggttattcttagaaagggtaaaaaataatgaatgttctattttcctgcattccaagtctttttctttgattatcacatgcttgaccaatagtaaatgctcaataaatgtgagctatcaggttggtgcaaaagtaagtgcagttttttgccattaaaataatggtttttgccattacttttgcaccaaactaataattatatttagaatacacaaaaccttccctttctggttattcttactctgatgcatttctattggattaccctttaagtaacttcagaagaaacaaggggtcttcatctttatacgtaatcttcttcagaagaagtttaacttcagaactttaacttcagtaacttcagaactttttagaagtttaagtaacttcttcagaagaaacatgtaatcttcatttttatatgtccaaacctgtctcccttttacaatcacacatgaatcacagtttggatgggaagagatttctagaattacctcagaatttggtcaatgttctcaatacgtagtcctttgtttttgtttggaagtgtatggaactttctcttcatcttcaagattcaggaatttcaccatgacatgttttgttggctctcttctttagtattcctgccgagtgtttggtgggtccttttgatgtaaacgctgtgcccggctatttcctttctttagtgaaaggaaattttcttttattattttttgcattatggcttctcttctaagtgacattgctactgaaactcacttaagtggctgactcttagatcgcgtctcatgtctcatatcttagtcttaaaatatctatttctttggtttgcatttttggagaatttttaaaagttatttgtacattaaaagttatttgtacattgaatttcagaagtgttcattttgctcttcagtgccccaattgaagttgctttgatgtactttagaattttttttctgagagatattctctatgtgcatagcaagttgcattttgaatgtaaaatcttcagaaaaataaataaggatgaaaactaggaatttttgagtttcctcatgttttctgcagtattcccaatgtctttatgtctttctatttccaatggctctccaaatgggtttacctgtcgcattgcactagacttgttcactgtagaattgtataggggctcctggagttgtcttcaagttagtgcatgttgcactatatctggacaatattcgtcagactttgtaacaaaaggtggggtttttcttaggtcctgctaaaagtagttttcttctctattttaatctcattttgcttgtttccttctctacagtttttataaatactctgtgacttcatagtttcacttttaatatgtacgtatattaagttaacacctcaattttttttttttttaaagacggagtctcactctgttgcccaggctggagtgcagtagcatgatctcggttcactgcaacctccacctcccgggctcaagcaattctccttcctcaacttcccaagtagctgggattacaggcatgcgccaccacacccagctaatttttgtatttttagtagagactggatttcaccatgttgggcaggctagtcttgaactcctgacctcaggtgatccgcccgccttggcctcccaaagtgctgggattacaggcgtgagtcaccatgcccaaccacacaccttaattttttttttttttttgatggagtctcgctttgttgcccaggctggagtgcagtggtgcgatctcggctcactgcaagctccgcctcccgggctcatgccattcttctgccttagcctcctgagtggctggggctacaggtacccgccaccacactcgcctaatttttttttttttgtatttttagtagatacggggttttaccatgttagccaggatgggctggatctcctgaccttgtgatctgcctgccttggcctcccaaagtgctgggattacaggtgtgagccaccgcacccggctggcacaccttaatttttataacagcagagactacaatggaggctggtataaaagggtaatacttctttattattcaagggttgactggtgaacagtttcagttgtgccctgatttttcctatcttaggatattatcttagtgttttatcaacaaacctttcagagcttctttttgtgacatttctgcaatattgagtttatatgtactgtaggattaatctattattgctctatcagcattcttgactgagttcttctgtgtaactatgaccattcatgtgctatgagaaatttggaagtgtcatatttgtccttaccctcagaaaacatatagtttgattggacaaagcaataaaatttaaaagtatataatcaagaaaaaattagaatgcagagataaaaataatagatgttcagagaagagagaaataagtgagggatgagatagtcatcaaatatacatggagactgtgaaaccttgtgcagagccttgatggatgcgtgtggcttgaaaaggcggcaaagtgaagtctggctttactgacgagagaaacaaggaaagggtttttgtgtgacagtaaagattcaggcctgattatctttaaagtagaacaaagagtcagaaattcaaagatggacatcactacagatccaataggtatcaaaaagataaggagatcttgaaactttatgcaaaaaatgaaatgggacattccttgaaaaactcaatacttatcaaaatagatttaagaaaaacagactatctgaatctgaataattggtaaagaaattaaattaattattaaaaaaacccccaaaaaacaaaaaacaaaaaaccaggccctgaagtcttcagcaacgaagtataataaacatttagggaagaaataacaccagtcttatacaaatagccccagaaaaaagaaaaaaataaattccccagaacctgacatatgaagaaagcgtaaccttgccaaagatattacaagagaggaaaattcaagacaatcagactctagcacatagaagcaaaaatcccaaacaaacaccagccaaccaaatctagctatgcaaaagatatcatgaccaaattaaatttgttccaagaatacctttagaaaattaatcaatgcatttcactatattaacaaaacaaagaaaactatgactatcccagagatgcagaaaaagcttttgataaaatttgtcgttcataaaaaatattcttaatggaagagaacttccttaatcttataaaggttatctgggggaacctatggcaaacatatggtgaaatgttgacaggtttctctttgaaaatgagaataagatacagatgtccactctcattcctattaaacattgtgttgaatctcctagacaaacgaagaaaagcaataaaatgaaatgaaagatatatgaagtgggaaggaaaatataaaactcattattcatagatggtatcatagtatacgtaaaatatccaaaagaacatacaggtataaaaattcaaagggcccaaaatagcaaaacactttttagaagaataaaaagatggaaggatttgctctactggatatcaggttatcataaaaccacagccatttacatagtatatatatatatatatatatgcataagtagataaatggatcaatcaaagagaagggagaaatctagaaacagactcatgcgtattttgacactcgatatttcacaaagttttcttcaacaaatagtgctgggactactggatatccatatggaaaaaaattaaacttgatccttatctcacaccatatgtaaaattcaatttcaggtgaattgcagatctaaatgtgaaaggtaaaataaaacttctagttgatagcgtagtataatatcttcctactctagtgtacataaagacttcttaaacagggctcaaaatatattaactattaaaaaaattacatttcactaaaattaagaatttttgttcattaaaagatgacagtaagagggtgaaaaggtaagcaactattcagaatacacacacacacacacacacacacacacacacacacacacacacaaaactcttacaagccagtaagaataagataacccagtagaaaaagggacaagacactgggatgggtacttcataaaacaggctatccagattaataaacctataaatcagaaatcagagaacttatagtttcaatgagattcaactatgcatccatcataatggttacaactaaaaagactgataataataactgttggtgaggatgtaaagcaaagggaattctcatacatggctggtaagagaataaattgacatagccactttgagaaaacagtttagcattctctattaaagtagaagatatgcgtatattatgacccaacaattccactcctagatatgtgcccaatagaaatgcatgcacgtgggcaccaagaaacggacaagaacagttaaagcagagctgctcccaacagcctcagaatttactcagcccaattgtccttaacagtaggatggataaataaattgtggtgtatttactgaataaaatacagtagctggctcacacccagtactttgggaggccgaggcaggcggatcacctgagggcaggagtttgagaccagcctgaccaacatggagaaattccgtctctactaaaaaaatacaaaattacctggccgtggtggcacatgcctgtagtcccagctactcgggaggctgaggcaggagaatcacttgaacccaggaggcggaggttgcggtgagccaagattgcgccattgcactccagcctgggcaacaaggtagaaactccacgaaaacaaatgaaccttggctgcatggagcaacatggagaaatctccaaaaatgattttgagtgaaagaaaccaagcacaaaagaaggtgtactgaaagattccatttatatgaaattcaaaaagcaaaactaaactctaatatttaagaatacaagttgtgatggtaaaactgtcttttaaaaaatcagggaaatgacttccataaaaatcagggtagtggctactttaatcagagagggatggtatggtgattggaatacagaggaggtttctggaatgctggtaatattttatttcttgaatagggttatatggatgttcactttgggataaaccattgagcgatacatttttgttttttccctgttctatatttgttttaacacacacacacacacacacatacacacacacacacacagacatacacacacacacaaacatatgcgcacacacaattataaaaagaaaaaacagaatggttacatatactaagtacagtaaattacgaaatgctgagtatcagtctttaaacatgaagtagatttatacatagagatttggagagtttttgaagctgtaccattaccactgagaaaataaaacagtctgcagaatgatgcacacaatgcaatacatgtatatcaaaacaatgctatacatgtttacatatacagcacagtcatcatgcatagaagtacatagaattaatttcagaggcatacatccagtctaaaaacagtgattacttctagagaagggactgagtatttgctgagagggctatccgtatgactggtataactaaaaataaaaaaaacaaacaaaagaagaagaaagaaaggaggaagagaggaaagaggggagggaaggaagaagagatgagcaaacctagaattttgagccaggccccccaagatcacaatggagatggtattgagcagcttcatctagaatgttccttgaacatttctttcctacttccacttttggggttgccataaattttaagaatttgttcattcactcattcattcaacaaacatatatattattgtgtttcctaaggcagagctttcgggagttttcgtgtttcagtccagccaccgagtgggccaacatttgatgatcacatgaaaacctcgctccaataacattcaaaatcttcaccatgaacaggtgctgggtagatcatgtttataagaattgtgtgcatttctgagtgtttagaattgtatgtgtttaggctgagcgcattggctcatgcctgtaatcttagcactttgggaggccaaagcaggcggattgcttatgtccaggagttcaagaccagcctgggcagcatggcaaaactccatctctactaaaaataaaacacaaattaactgagcatggtggtgcctgcctgtagtttcagctacttggttggggactgaggtgggaggattgcttgagcccaggaggtcgaggttgcagcgagcctaaatcgcaccactacactccagcctgagtgacaaagtgagaccctgtctcaagaactgtgtttttatttattaagttaatcaaagctttaaaagtctcaaaagataacaatggctgagcagcttgtaggactctgggaaactgcaggggaaatactcatgaaaccttaaggagtaatttaatagacttagagatgaaaacgaaaccccaaggagacagcccaggcacagtagaaagagagacacacagttgtaccagtcgtttagaagcagatgtgaacgatggcccaggtgtgacgatcatggtagaacttgatgcaggacatgtgtgtggcaggaaatacaggcatgttttcacacattccatcaggcacaaatgtgctcttcgtgtccaagagattatcttctaaacttggcctttccagtggcacatgtcagtaaatctctgatacttgactagatctgcttctagaaacagaaagaagcttcatctttctttccatcgccacagcctccgggggtggcctccctctcctaccacccctaccattcattctccatctgcagttggcatgctcctttaagagtgtaaattaggggccaggcgcagtggctcacgcctataatcccagcactttgggaggcttagcgggtgaagcgcttgacaggagttggagacaggagtttgagaccagcctgggcaacatggtgaaaccctgtctctactaaaaatagaaaaaattagccaggtgtggtggtgtgtgcctgcaattctagctactcaggaagctcaggcaggagaactgcttgaacccaggaggcagaggttgcagtgagctaagattgtggcactgcactccagcctgggcaacagagcaagactctgtctcaaaaaaaaaaaaaaaagagtgtaaattagataatctttcttccttgcttaaaactctgcaataggcctggcatggtggctcacgcctgtaatcccagcactttgggaggccaaggcgggcggatcacgaggtcaggagatcgagaccatccttgctaacacagtgaaaccccctctctactaaaaatacaaaaaaattagctgggcgtggtggcacgcgcctgtaatcccagctacttgggaggctgaggcaagagaatcacttgaacctggaaggtggaggttgcagtgagccgagatcatgtcactgcactccagcctggcaacagggcgagactctgtctcaaaaacaaaacaaaaccgaacaaaaaccctgcaataaggacaatttttattaagtgttggtgctgtattcatattttctcatgtaatcctcctaagtctccaagcacctcagtaccgtcatcattcccaactcactgatgaggaagttgggcttaaggggggcctgcccaggccgggtgcagtggctcactgtaatcccagcctgtaatcccagcactttgggaagccaaagtgggcggatcacctgaggtcaggagcactttgggaggccgaagtgaggggatcacttggggtgaggaattcgagactggcctggcccagatggtgaaatcccatttctaataaaaaatgcaaaaattagctgggcgtggtggcaggcacctgtaatcccagctacttgggaggctgaggcaggagaattgcttgaacccgggaggcagaggttgtggtgagccgggatcgtgccactgcactccagcctgggtgacagagtgagactccatatcaaaaaaaaaaaaaaaaaaaagaaagaggggcttcccaaatcactccagctaatgtggaggctgctctcccacctccaagaatgcctcctcctcccgttatgatgttttcttcatagcatttatcactctctgagatttccacttatttatgtgtttacagtcagccttttcccactagaatagaagccttaagagtagagggactttaattttttcactgccatattccctgtgccaaaatgatgcctggcacatagttggcattcaataaaaatctggcccagtgaacttcatgctactctgaaaagtttattaaatgtatccaaggtgaccaagacattaacctgcatttataatgaactatataaataaatgtagtcaacaaatattttattaactcaaaagtaagaatgatctgtgttatcttcacatggtttgtttaccaaatacagaccatataccagtcgtttttaggcaccggtgataaaaacacccaggtccttatcttaaggggctcataaatgtgtgtgtgtgtgtgtatgtgtgtgtaggaagtgggtgggaaagggaatataagcaagtaaacagtgtcactacactgtgtggtcaatacaattatggaggtaaacacaggtgctggtgacataggggaagggcaggtagatctgaagggggatgaggaagggtgttggcaaagctttcgagaggagctgagaatacagttgagttgggaagaacaaatagtgattatccaaagaaagaatagggaagcgtaaatagggctggagaagcaacttgttctgggtagggaagcaccatgcttcgggagctgcagggtcgtgagtttaacggtggagaatacagctgggatgtggtgagggatcaatctcggtgtgcatggtgcagcccttcgtagatgaccctgatatcagtggacatcacttacccatgtctgctttattttccagtgggttcccagtgctagtgtggtgcctgtcagatggaaggccctcagtaaatatttcctgaatgagtgaatgaatgaatggatttggaatgttacccccagtacccctcgttccaggaggcagttagagttttacgtaaacagaaatgtgatctgatcaacatgctgtttgagaaggaccactctgggagcccgagagtagaagagggaagacccgggtcagtgaggcaggtaaacaagtgcgtgtgggagtgcatttgagggctgtggagtgaggtgggtggcaaggaaggaatggatttgagagctccttggtgacctactggatggaagtaagaaataaggtcacctctaggaggttttctgatttctggtacaaggcctgggtatgtggtggggccattcacaggacatgagactggaggtggcgcagcctaaaggcaagatactgggttcagctgacacctggaacacccaggtagaaatgtctaatgatcagccaaaacctgggcctggggccaggagacaggtctgggctggaagaaggtctggacatcagcagggtctgggcagtgctggaaaccagacagtaggaggagagcactcagagagggagccctgtggggtgggcacagcagtggtcttgggggcagatggaaggaatcggcagaggtgacccaaagctggctagctggtggcagtggaaccagttatggtttgggggggtggaacaagttatggtttgggggaatcaatggcagctgcaagaggaccttgtcattttcacctgcaatagtgaaagaatgcccaggttggaagctgaaaaaataaaatccaagatagaatgaggtgggaggaatgggctgaggcaggcagcttggaaccaagaaggaagtggatgctggaactccctttttatatggttccctgggcgaagtgcagggtgaggtggctttcaggaaccattgggatgaggcggtttctgcctttgagtaactttccatgccaccacccaggagattagagcttcttcttcttttttttttttttttttttttttctgagacagagtctcgctctgttgcccaggctggagagcagtggtgtgatctcggtgcactgcaacctccacctccctggttcaggcaattcccctgcctcagcctcccgagtagctgggattacaggcacatgtcaccatgtctggctagttttctgtatttttaatagagacagggtttcactatgttggccagactggtcctgaactcctgacctcaggcaatccacccacctcggcctcccaaagtgctgggattacaggagtgagccctgtgcccggccagagcttcttttaaaaatatgtgcctggggtcctggccttcacctgtactttgcctgtaattttccacctcttggtctttactgtatagcacttgagcaatcagctgttcagggtggtacagctggaggcaccatatgcacttcggcaattacatgtctagactcattacttactttcttttggcactgattccacatgattcgggcatttccaatcatccctagttccacttcttagatcttctgacctcctggcctagccctggagaaattttattgcagtgtttcgggtactgagaacacaggatccttgctggcctcagtttcccgtagctctgattttttttttttttttgagatggagtctcgctctgtcccccaagctggactgcagtgtgtgatttcagctcactgcaacctccgcctcccaggtttaagcaattctcctgactcagcctcctgagtagctgggactacaggtctgcaccaccatgtctggctaatttttttgtatttttagtagagatagggcttcaccatattggccaggctggtctcaaacccctgatctcaggtgatcctcctgcctgggcctcccaaagtgctgggattacaggcgtgagccaccgagcctggccccctagctctgattctaacccgaggcctgctcagcactgctgatgccctatttggaaaaaaaacatttggcaatggacccaagaagccatcagtttcaagaaattccgctttggaaggccaagcaaaggaagcattcctaaatgcagaaaaagccagagaacaaagatgttcatctagggatttgctatacaaatgaagagtgaaaaagtgtcacctgaaacatccaagagcaggggaaagattaaatggacaccggcatttcctggagtaggatataacacagcaagtctaaataacagttatgaatgttagttaaaaacattgacaagctcatgattagatatcaatgaaaaaatggaatataaaattatatgtaccgtctgattaaataacacatatccataaaagtttagaaagaaacctctaaagtgtcaacagtggctcagcttggattgtgggattatgggcatttttttgtttcctgaattttccgtagtaaggttacagtaatcttacaatagcaaaatacaaataacaatcttttaaaaccctgaagcctaatttgacaggtacctcctcttctcaattgtccctcaagcatgggctgtccctgtcctgtccccagcctggccttcctgctccctatgactcgattcctcctcttggcttatctattgatctggggaggttttacagaggctagccagaagcttgtgggcacagcctcctgggcggaaccagaccccctccctggggtagggcagccaaggctctctggttttgtttttgtgtgtgtgtgtttttgttttattttgtttttttttgagacagagtctcactttgtcacccaggctggagtgcagtggcaagatctctgcaacctctgcctcccgggttcaagcaattctcatgcctcagcctcctgaatagctgggatgacagacatgtgccaccacacctggctaatttttgtatttttagtagagatggggttttgccatgttggccaggctggtctctaactcctggcctcaagtgatctgtctgcctcagcctcccaaagtgctgggattacaggtgtgagccaccgcgccccacctcaggggtgttgacttttaaaatgtgggaagaagacaattaaatgagggctttaaagctttacatgcagtgagcaaggaagcttctggaaagcatttgaggcccatttcccacgacttgtccctgacagtagctatgaaaatcccggggtggggctcatgggagtgaggtatgcatcctcttgtgggacgctctggctgagcagcgcaggccaagagacttccaggccacaaggaaataacaccatcaagaccggagcgatggcatcacgggtatcccctcaggaaaaactcagaagctggcacagaggggcacgctggctgaggtggggtaagcttcctggtactcgggaggtctgctaacaagaggacaggaaaggagactgggactggatggcgtggtaagatagggacctgggcacagggatgggtcaccagtgtgtgttgtagctgctctaggcagggtaaatatttcccacctgaggagggagaaaaatgccagtggtgttgcaatgttactgttttgcacagctgcggacccagaaaaggagaaggacaccctttcctgccctactctagattagaagattcccgctgtcttctattcctccccagctgtttgtgtttcaggccttctgagggggatcatgctgaaggcacctccagggagagaggatgtggggggagcagcaatggcagagacctatgtcccaaatggaacccatggctccaaggctgaggctcctcaagcctccagctagaccccctttttcctcatctccctccctgggaactcaacctagccaaaggcttcaggtaccaccctcagagggggcacagaggttgatatccccagttaagtggggacagcccaccatctagagcaggggtgtccaatcttttggcttccctgggccatactgaaagaagaattgtcttgggccacacataaagcatgctaacactaacaatagctgatgagttttttaaaaaattgcaaaataaactcatagattttaagaaagtttacgaatttgtgttggactgcattcaaagccatactgagacatcctgggccacactcaaagccatcctgggctgcattcgacccatgggccatgggttggacaagcttgatctagaggaaattcctaccttattctgccagcaaatatctattcatcaccctctgtgtcaggcattgtatcaggggccaggaccttaccatgattagaccaaggccctgttctctggagcttacattctactgaagcctcacggcactgcaaacccattatgtgctgcaggctaacactgatggagccgggcactgtgttagagccaaattagagctccttacatcccttctgctcattaggatctgcttcttctcagctcctggagtgccactgagccttcaagtggagtcaggtttccccagctgtggaaagaggggacatctggggaataagagtcaagcagagcttggtgatctgaatcaatttttcttttaaagcattgggcctttgtagcaataatggcaaaccgctattaagcacttcccacactgcaggctgcactgtactttccgtgtattgtgtgtggtatattggacacgaccctatgccttaggtctgattatgttacagatgaggaaactgaaccacagagttcagttacttgttcaagggtacacagtcattggacacaggcggtctggctttggctccatgctcttgaccaccaagctgtactgctgccaactagccacctttggtgagacctgctctgcctacaattctcttggatagttcttctcttggaagcaagaatttgtatgccatcactgtactctcgtggattcagatggatctgaagatggatgtcaagtgagattcctcctcctgatcagagatggtggtatctgctgtcacttgaacttggcatgtgtgtcctcaggatacctgggctatgggctagccatcttccatggtgggcatgtagaggcagagagtgcttgtctccaaacagacaagatggcatggggagggtggggtgatgtcagacacttcatgagcagagcagagacaagatacatgtagtcccagagaaaccaaggatgtcttgtctagttccccaggagccctggatgtacgttctgttactggattctaggatgcactcttgagtcctttgatacatccttgtttttacttttttaatgtaataattacaaaatgatggccaatgagattggcgaaaatataaagagtgttgcaaatagcactcattcaacgaatcctaatctttcagcaaagagattagcctggtgtgtgtatgtatgggtgaaagtgtgcatgtatttgtaggatctgcccactcaaatcaggtgatgaaaagttgacagaggtttcaattaagattgacataaggtgaaatttgaaagccacccagaaaacacatgatacactgttatgaaactaaatcccagggcaaagatgtgggcacagagggactctcttgacacagctgacaagttccaactctactattccaactccagtattcatggctgctcaggcaaaatcattctggaagtacaaagcacctgtgtccagatttggtgtttacttctctaccaagaacttgaatttgtaactgagtcaaggtcctgaatctgccaccagtagactcagttcactggagacagcaactctcttcccctcagttgggtaagggactttgcaaccctgggaaaatgtagagactagtgtagaatcaatgaggagcagaatcaaaaccagaatactatcatattttactgattctaaggtgcacagtgttttacattttaccatcttgggaattagaatgcattttacaatcgatggcatcaggccacgcacagtggctcacacctgtaatctcagcagtttgggaggctgaagcaggtggatcgcccaaggtcaggagtttgagaccagcccggtcaacatggcaaaaccctgtctctactaaaaatacaaaaattagctgggcatggggtgggcaccctataatgccagctactcaggaggctgaggcagaagaatagcttgaatctggggggtgcggcatggaggttgcagtgaaccgaggctgtgccacttcactctggcctggcaaaagagtgaaactctgtctggaaaaaaaaaaaaaaagaaaagaaagaaatcaatggcaccatatgattataaatggtgatctaaaataaaagttgaaaatttccaaaaaattataaatgtttgtgttttttctaccttagtgatatcctaaaaaaaaagttgaatcttatatcttagattcaacaaaatatagcactctgctttagttagtttaactgtctctcccaaaaaaagtgtgatgaaaacttaattcccaatacaacagtgttgtgaggtggggcctaatgagagggtgattcaatatgagaatcaataaaatatgacaatactctggttttgattctgccctcatgaatggattaatgctattattgtgggagtgggttccttacaaaaggatgagtttggcccccccttggcctctgtcttgcccttccactttttgccatgggataacacagcaagaaggcccttgccaggtgctatcttcttgatcttggacttcccagtttccagaactgtgagaaataaatttctattcattataaattacctagtctgtggcattctgttatagcagcaaaaaatggaggaagacacactctttttgtggtaaggttaggaataatttttaaatcatcactataatcttttggttatttaaagagattggaacatggaagaaaatctaacatagtagacagcctggcatattacacttgcaattttaatttgaaacatttaagaggatataattaattgaatttgtagacagtctttggaagttgtattattggggtacaatctaaccacaaaatgtaatggctcaaagatgatagaagtttatttcattttttgttaacagtcagtagtgaaatggtccagagctggaggccaagcagccttgtgatttgaggtcttctaaggaattggttccttctctcctttggttctcccttggcctagggtgttatcttcataagcatggttgatggtggctcactaccacatcaacgggaagtgggaaagaagaaagtctatggcaagtgtctttaaggagatgcgctcattgtagcacacatcatatctgctcatattccattggcccaaacatagtcacatggtgacagccagctgcaaaggagcttgggaaatgtagtctgtggttgtgtggtcatgcaactagttaaagcttaagggttttagctaaaaggaaaagaggggagaattaacactagaaaacagtcgatacttatccaccatgaagcttaagagaagctcattccctagatttattaaatttcaataatcgcttaaaggcttagaaagatcttgtcaggtttatgagtttgccatatcaggttgaagtgttttagagaatcagatatattttaatttcaaatgcactaaaaatgtcttaggaagtttaataaagaacagaaatttattgtctcatagttctggagtctgggaagtccaagatcaagatgctggaaggttcagttgtctggtgagggtttgctctctgcattcaagatggtgcttttgagtgctgcatcctctggaaggaggaatgctgtgtcttcacatggtggaaggcagaagggcaagcaaggtgtattcactccatcaagcccttttaaaagggcacctaattccattctagatggaggagccctcatggcctaatcatctcttaaaggccccaccttttatcacattggcaacacatgaatttttcaaaggacacattcaaaccatagcagaacctttggacaggtttctattacttatgaccaaaaaaccctgaggaagacagtttctcctccaacccccttatgtttctatgtgtctctgtgtcacagagctcacagctacatttctaaaattatgacaactctcaacacatgcatgaatggaggagacacccatggtacccattggttgcctgtctagcctcccctttgctgcaaactgtttctccttagctataacctcccaaatttgtagggttcagaggtagttattagcagccacagtgatatgatttgatctactctttagacctggctgattggcccaagggtggaccaatgaaccagtttaggctaatcaagtgccaattgaaggagagccttggagtatcccttggtgtttagagggattatatgtagaccaaggagctgagaatggctatcatctattgtgcagatgggagagcagagaaaaagggccctttcagagagagaagaaagctgactggcagagaaacagaaaaaaaatgtggagagcatcttggttctagtcagttcctgagactgtcagctgcatattgcctcgagtcctgggagacatccggtacacttataataatttatctagagtcagtttctactatttgtaacccacagaattctacctaatacgcctgaaaatatattaaactcattgtgtaaagcaatcttgtgagttttgttttcgagagagctacttagttgtctcaattagtggaaaattccagtgcagatctgacctttgggtttcagagtacagggactgatccaaggcatgtgccctggtaagcccaaaaaatcaagcttacctaaaactcaactctttcagtaactctagcctgataatcactgcaaaatacccaacaatgactgagtgttagaaagttataggcaactaaccatttttgacttgtataacatcttattatacttagaataacttatagggtgatatccaaattgcattatatggtctatggcatagactgctagtttaccgtactctgcaacgtaaagctacatttcccagcctttcttgaaggcaaggcaggtccacaggaaggacaaagttctgatccatggaatatgagtgtaagtgatgggttcaacttctgggccacttctttaaagggaattactcaagtcttttttctattttgccatactgttcctggaatgtgaacatggtgctgggagcggaacagccataaagaaccatgagatttaagccatgtcttgtaaatagacagcaagctggaaaaagcctgagtcccatgccctggttacattcagatctttccacgagagacaaagtcttgtttaagtcactgttactttgacttttgtttcagtagctgaaccagtaccctggctataatatagtctttgcatgggaaaacaaaaaaggaatgacttttattgagtcacaaatggtctaaatgtgggcagttgtgcactcttggaaaaagcacccaggctgcagaaacaacttagcccatgtgagatgaggagtacccatctcacaaggtggaggaacaagggaacatttagcccagagaagggagggctcaggatagactataaaactgtcttcagacacaggagctcatgtgacagagggagtagacttgtgccatacggccccaggggtctgaactaagaccaataggttatgcaggaaactgaagtgctatgacccaaagagttctgtcagtcagggttcttggctatgagctacagaaacagactctgtgtaaagcaaaaaagaaatttattgaaatgatatttgggggaatcacagaatggactagagaccaggggactggccaggagccaaaagcactctggagggctggtaaccaggaagattggaagccacaggcatggagcagcaacggtctggccaacatcatgagtgactctaactgttcctcatgttgtccactcaggattcaaaagcatgggggaagagtctgattggccgcagttgaatgtcttcccttccttgactaaatgtagggtaggaaaggggaaaatttggctctgttgactctggtatgagagtcaggcaccacctccaagaggaaccaagatgctatgagacaaatgtcctgtgctacctgcaaagatgcttttgaagcccatgaatctgtgaccagtggctcagaattgggaaggacttgtctattcaacagttagctcctttcctacttccctcacatgcgcacacactctgctgaatgattctggtgatgaaaggctgactatctcccaagttcttcctcatgtgaagatgaaatcaaggctgggagtttagacactgcctggcgcttaagtccctcccactttggtctcacttttgtagagttgagtcccgtgattctcttactgaaaactttcctcctgtcaaacttattcaccccatgtcaccaccctctgaccccaccaaaacatcttgtgctcattctctttcctcttatttgtaaaatgttatccattcttcacattccagcttaagtcccacatcatacatgaaacattcctgaaccatcccagttcaaagtaatccctctctggaaatttttgcccttaatcttgattagacagttaatcacactcttttttatatgttttctattttttagaatagatatttcaatcttgttaggacaatttaactgtaaacacatttatatcttctcttgctacctagatttcttacgcatctttgcatctcctgtaaactatttcttatacttctttgcatctcctgtagaacttaatgggactttttgtttgttttgtcttaattgacttgaataccagaagtgggtgtgatcttgatccttttatccaggaatttggggaaggggaaacagaggaagatgaagatagatgtacatcagacaaaccaaaatgactttcctctgagcataatgatgtgaatgacttatatttttacagttttgaggtataattgatgtataataaaccatacatatttaatgtatacaacttgatatgtgtatatataatccatgaaaccattgccctaatcgagataataaatatatccatcacgccctcagtttccttatgccacttcataatctctctacttcattctgaccccaagcagccattgattcattttatgtcactataagtttgtattttctagaattgtatataaatagaaccatttagtatgtactcttttctgtctggcttctttcactaagcataattattttgagattcatccatattgttgaatatatcaacagttcattccttctattgctgagcagaatttcattgtataggtatatcacaatttgtttttccattcacctgttgatggttatttgagttgtttcagttattgactattacaaacaaagctgctgtgcacatttgtgtacaagtgtttgtgcgggcacatgctttcattcatcttagataaatatctaggagtacaatggctggtcacatggtaggtctgtgtataacattgcaagaaattaccgaaatgatcacacaatgtacattcccataagcagtgcatgtttcagttgctccatcttcccaccagcacttggtgttttgagtctttctaattttagccattctaataggtatgcagtggtatttcattccagttttaatttgtattttcttaataactgatgttgaagatcttttcatgtgcttattggcccatctttgatgaagtgtctgttcatttaaaatgtttaaaaaatgggttgttttctgttttcttttactgggtctcttttcaaccatggctgatgatcacgagggcattctcccatgtagatcaacagaaccatgtccagtcagtcccagcaacagggggtggcatgagcctcacagatggctggactttgagatgacacctgcatgttgactgtcttaccaggaagtgttgcctggcagtgtcatgacacttaggtggggacccagtgaaggttttgggactgaccccctcctcttggttaaagccccgaattaagagactattagagaaataagagttactacctcagctcctcagaagatgatcatgttgctatgaagactgatgaaaataaaacatccaagaagaaatgctaatgaattgaagtgtaatagaagccttacattaggagctgtggaaataccaaaggtgcatgtggccagaacaaaggctagttggtcaagaatgtttctggagaagaaacccaagaccgtagttgacactggccccatgagctgcccctcacacatctcagcagtcgccaagccctgtggttctggtctccaccgctcctctctgcagccaccacaacgccctcctctgcattccagagcaggcacgcttgccccctttgaagccttctgggcctcatctccttctgtcctttcatctccagccttaaaactccatgctgagtgggcctggctcacccagctctccccgcctggccctgaggactgccccccagttgattttgcggggtcctcccgaggacctttgtttagcgcctggccagggaggcccagcccctggagacccctgcccaccgcagcagtctctggtgcctggcctttgttccctttactaaatctaaaatgcttccacatgtgttcttctgattttgcagtcgtggagaaagaacatgaggctgtttaatacctccaatttcattgacatttaacattaagaacacttgtgggcctgttgggggacactttacaatcttgttattaggaaaaactctttcagcaagcagtgatgcaagcagtattttgtctttttaaagtcataagagtttttaaaaaaattctctctttcttaaaaaagatattgtagtagaagaatatctctcaaaaacatcccataatttttttttggcaggatagggtgagatggggctgggaataagagaacatgagatttaggcaatctttcctttaccttttttcttataagtagagcccaagttgaaccacacccccaccgttgatgaaagttagaaaaataatcatgaaattggtggattaaaagaaagaaaatgtttaaagagctctccaaatgtccgccctaagaagttccatacagtattccattgtgcaaggaacacaaccaatagcacttacaagctgacagagttagagaggtacaaattagcctatgtagcacctgggggcttatggagaagaaaaagaagaatcaaagcaaatgggcatggccaagaaggtctgaaaggtgggtgagggtgagtgtagggggatcaggaaataccagcggtttcactgataaaagttacaaacgaaatacatttgaaatgtgacttgcatttgggccattggctgaggaacacagatacatacagggcagcaaggcaaataaatggggttttacaggcccaggtcctaggagtcagttagggaacaatcccaggacttagtgatgcaaaattggggagttggagtatactttaccatgaatggaggctcacttttatctaggagaagatgacaggctgatgagagtgatgactgacagcttaacagatgatttggtgctaccttgggatcactgtctccattaactggaaacagtcacatttcgccactttctgggggcagtatttagagacacaaggttacctaagcagaatgatgatttgtgcttatcttacctcttcccaatgactgttagaactcaccttttagggccaggtgcagtggctcatgcctgcaatcgcaacactttgggaggccgaggcaggcggatcacttgaggtcaggagttcaagaccagcctggccaatacggtgaaaccccgtctccattaaaagtagaaaaattagccgggcatggtggcgggtgcctgtaatcccagctactagggagactctgtctcaaaaaaaaaaaaaaaaaaaaaaaagaaaagaactcaccttttagaatacaggagtatcacactcacaatggattaatccattagcaacagtaaaactgccatcatggcatcatggcacgcagtgcatgcctaagaagaatatggcaagcaaaagttttttctttgaattgtgccaccccagggctctatggctttggataaataatgtaccttgtttttgtatcagattccttatctacagacaaggagatcactcatttattcactttccactgcccacctgtactgttagggtaaaccgggattctggcaggaaagatcagtttaaggctgtttagagccaaactccaatgcacttggatcatgggaactcatgttatgggcaagtcttgccttaaatccttgctgctgagacacctccttgctttgcagaacagcgcattcagggacagaaggggaaaaaggagccagacacagggaccaaggagacaaaggaaaaccccaagagtacaggatcatggatggccaagaagagaccctcaggactgcagagaggtccctgacgatgatgccagggaaactacttggtggacaaatggaaggccagtggtgacagtgtgagggaacacagagtgcaaaggctggaagatgcagtgggtctggggatatgtggctgtgagaagaagaaaagaatgacaacttgagagggtaacagggttatgacgaggtttttcttccccctagctagaagagacctatatatgcttcatggcagcaggaagaagtctgtgcaaggggagaatttggccacttaagggagggcattatatgggtgcaaggagtgggagactgccatcacccagggaagaggacagagtaggactacaataaaagttggttgatcgacagatagttgctcagtttgcgctggctggtaaacataatgctgtatggtattggggttaagcgtgcaggctctgagttctgcataatttggggcaagttgctgagatgtttatgaagtctccttttccctatatgtaaaatgggggcagttataatacatatctttgtggtaagaactgagagttaatacatgcaaataatttaaaataggttctggttcatagttaatgctcaaaatgttagactcagtaataaaaataatggccatctttgaggattaacgattgaaagctcaaggtcaagtctcattatacagcaacataaaagaagaaggtaaaggtgattaaactgacccagggcatatcttgaggttccttttttacaaatagggctggatttcaacttctgttcttattcttctttcctattccccctcaaaaaaacttacttgaaaattaatcaaacttctggttaatcaaatcttaaacacataccataataaatgttttggagaatctaagagagtcatttttaaattaatatatcaaatgctgcagtaatatatttctattatgctgactatacatagtataaagttaaaaattgttttggtgaatttaagtttgtagttatagtaggaagacactaaatttgcaacagcattcctcgtgatttaaaaaaaatctttttttttttaaatgaagccacaagcattctgcttctgtgcttttttattttttatttagttttttgagatgtagttttgctcttgttacccaggctgcagtgcaatggcacgatcttggctcactgcaacctctgcctcccaggttcaagcgattctcctgtctcagcctcccaagtagctgggattacaggcacgtgccatcatgcccggctaattttgtatttttagtaaagacggggtttctccatgttggtcaggctggtctcaaactcccgacctcaggtgatccgcccgccttggcctcccaaagtgctgggatcataggcgtgagccaccgtacccggccgcttctgtgcttgttaaaaaaaggttgaagggggaaaatcacagtagctgccctctctctgcttttaagaaatggaatgagtctgtgggtggctaccagactgggagggcttggggatgctgactctgtggtgaggtattacgcagtcaggttaatttccttataccacttgtcaagttagaaggagtagagaagatgccaggtcttcactcatccctgggcattaagggaaaactaaagagcttccaagaggaaatgctctgagttgaagtcagctcattgcgccgcctcagtgtttgacttggcatattactacggggtctttattttctcattactaaactgggtcatgtaattgacaagacaggggacagtcggggtgggaccattctagaaaatctgtaactgacttttttttttttaatggagtctcgctctgtcgtccaggctggagtgcagtggcgcgatttcggctcactgcaacctccgcctcctgggttcaagcgattcttctgcctcagcctcccgagtagccgggactacaggcaagtgccaccgcacccagctgatttttgtatttttattagagacaggatttcacgatgttgcccaggctggtctcaaactcctgaccttaggtgatccacccgcctcagcctcccaaagtattgggattacgggcgtgggccactgcacccagcctgtaactcacttctgaaggtccagaaattccttgtttccttctgttatttatagtacgctacttatttaaaccaaacatgaagttaattgacacttagccaggcaatttggattacctgtgtggcttcacacaggtatgggttgtagacaagtctaaaaatagaaaatgttaaaatccagctatctcagaaaaacttgggttcatctccatctcctacctcccatatgtcacaaatagacgcatgggatgtgaaatggtaacctctgggtaaggtgacaaaggtactctaatcttggcttacgtggactacacggttaatccactgaataacaatcagcatcttcatctgtgtggtaggagaaccggaggtcagaagggtagaggggcggctaaaagtactttgtttctattactgtatgaccttggactagttacaaaactttttgtgcctacatttcctaatccctaatatggggttaacagtgcttgcctctgtttaaaaaaattactcagtgatgcttactaaagcatggtaagaaagactttattcaggaccaacgcgatgggtacagggatcagggaaacccggggagagagagtgggctccaattctgaatgcagcgtcggcaagtagaaatttatggccatgtaaaatcactaagagtaaccatcgggggaagagggattctggctcaaccgatctaaaggattcttgtagaactcaggccagggtgaaaagacatgactgggggatagaggaagatgaggaacctgatctgctatgaggggatgggggttctgtgctagaactggattttacaaggaagtgcacagatgggcctagcatgagattcagaagcctgactaaagtttggccaagcaaagaatctttgtcacctcagggctgttgtgagaattttaggagacacatccaccagccttggcatggggcctgatgcagagtaagtgttcactaaactttacctattaacgttaaagcactttaagttgacaaacactccacgtacagagcttttaatggggcaaacaaggggcagaggcctcagctgcagggtactcaacctctaaggaagggcgctggagaaaactgcacttgcagagcccctggctggagggcggagaaccatgtgggtgtaaagggatggcaagggcagaacgtatgcccctgcccaccttagacagttgctaaagggtctcccaggcactcagcctagcctttaagtgaaagcggaggaaacatttaaagaaatgagatagagttaaggtgttcgcctgccctccgctgaaacacgtgggggcaggtcaggggcacaccacaaatgcccgtatcgcgcctgtgtgtaccaggcaccgtcctcggaggttaacgtgcagtaactcactcgggtccccactttcggcacaggcagcaggcccaaggtcacgcagtgccaagggactgagtcagacccgagcccgcgcgccgcggcccacggcctgtgccagcgcgctcctcgccgggtagggggcctggtcagccgcgtcagacctgagagttgtggctgggggcgagagctgcacccccctaccgaccccgggcgggaatgttccagaacccctgcgagcagccgttggccgcacagcccccgggccggccgcgaccccgccttgcgccgcgaaggtccctagctccggggagtcgcgggcgaggggcacgcgcacggacgagaccgcaccgcagcgcacgcgcactggcgggcactcactcgcccgccgcccgggaggagaaggaaggcatggaaagttccagccggttcgagagctaggtagcaggcatggcaggaggcggggtaggggcaggcagggtcgcgagggggcgtgcggccgccgcgagccgctctgggccgcgtctgcagcaccgcccctagccgcggccggcgggctgggctggggtcggggcgggggcggtgcggcgggtgcggggctgcggagggggcgtggcggccgcccgcgggcggagagggggcggggcggcggcaaggcgcgcgggcggggcggggcgcgccgagggggcgtggcgcggcgtctgcgcagctgccagcgcctttaagcccgggctcgcgctctcggaccgtgctttcgccgcctgggagccgtccggcgcagcagtttctaggtccccactgtccccgccgtcccgccccttcgcgtcccgggaaccggctggcttccgagccgcactcgccgatcctccaggcatgccccgctacgagctggctttaatcctgaaagccatgcagcgggtaagtgaccttccctcagagccggtcttcccgcgcgggcgcccccgctgccgctaggccgccgtcccccgcgcgccctggccgcgggaccccgggccttcctgcactcctcggaggaggccggggcggcgggcgggcggcgggcgtccgcgggaagggggcgcgcgtgggccggccgggcccggccgcgtgcgcgcgggaggcgggggtgtgcctgcgcgtgtgcgcggtccgggagggtgtgcctcgcaagcggcccgccgggcggggggcggggcggaccgagcgggccccgaccccgatcccggcgccggcccgcgggagtccagtggaaggtccgcgggaggacacgcgcgggcgcccagcccgactccggcccgtccccgccagtcgtgaagctgcctcgtcgccggccccgccgccgccgcctggtccgtcccgctccgccgcccgccggctgccgccgaccgcctccgctctagcgcccgccggccgcccggaacgtccgcgcccaataaagcgttcctccaaagcttgtttgtgccgttgtctgtattccagtctcttgcaatcgctctcatgttaaaaaaaaatcttttgacttttctttttctgacttcagcgaaaatcccgctccgggtgcccttagcccagtttcattcatccaagttgtggcctttcttgcgcctccagaagacactttcttccccctgcttttgattgatcttgaggtaggggatttcaggtttggagggatgctaagcgaaccagcggcccctttcaggtgacggcgtggccaaggacaggggcccgcggcccggaggcagctcacttcgtcctctgtcctgggtcatgtactcctcaagtcgtcgccgaaatccccattctcccgtgaattcggaattcggtaacgtagtttggtgttatgtttttttttctccaccaggtgtaataaaacaaaaatcattgtaccacgtccgaactttgtaagcacagcttcctacagcgctagaggagtggacgcatttttacgtttgaaattaggctccaggtcaattgcgaggagtattaccaagtttggttgaacttaagctcaattgataaactaacaatcacggagcgtcgggagattgttaggaagtgtgctttgcatattgttaactgggaagggacgccagtgcctctctatgaggtccagacagcctggccaggcatgccattgtgtcccccagcttgttcttcatggatttggaagaagttaagatagtatctgttcagcctcttgaatatcccttttggccctcctccttgcttaccagcatatgtaactccgaaaggataggagcagtgaaaacaaagcattattaaaagggaagatttttaattaggtggaagttgtttaagccctcccttcaacttacgtgttttagggaatgtggaacctgggaaattcgttactgaaattccttttgtttactttccttgtcttggggaggtagcaggtgacactgaaagaggcaacctgtaggcaataatatttgctcattctgtaaccctttgaaacctttgaaatgaagacttgccctcccctttgtttttgccatagttgccaagtatcttggttaacatggctgcaagtattaagtgtatttcttttaccatttttttttatgtcctgtaataacatagcctttggatgtggagcacccatttttcactctagttcagatcaacagagcgtaatttggttaaaataataaataaccttccttgaaatcttcgcatgagggaaggggggcaaaaaaaagaaaaaaagccctagaaagtagataataaaggtgaactgcctcttggagaaagaggccccatggcagtagatagaaggttgtaacagtggtgacttatgtacaatggcgaagttatgttgaggagatccttgacctaaataaagtaatattaaacaatagcttctcagttatttgttcaaaaacctatctgtagcttgtaaatgtggcacaaacacaaagacttccaggttttagaccagtttgcttgctttcagtttaggaaaataggattctaaaataggatgaatgtttggggggaaacgaatttaaaaagttaactctaggcttatgaaatgaaaaatgcgactgtgagcttgcacaccggtagcaggccttggagaaaccacagttctaacccgaggcactttgtgcttctgttgcaagaagggtattgaagctcctcagttcaaagttgcgtatcttccacgtttttagattcttaagtgtatacctctttacccctttaatatgatgtattttcctttcctccccaaatcatttgtgcatcttggaattgaggaaaatgctgtgttaggcaactttaacagcggatatggaagttaagaaactatagttttccagcctttggactcccagagctgctctcctgttttttctccgcagtactcagcctggagagcattcttagtctgtttggagaatattaactcctccctgtcctcattactttttttttgaccctagcttgactcctttaaattgagcttgcaaagttttaaaatttaaaatacaggccctgtgttggctgtcacagtatctggattgtagcaaagtcagttgcgggaatgcccattgaaagatttcagagtgtattatgtagagtcagtcatattgaactatacagttgtacaattagtcacccagaaattccaatactatgtttttctcagtttgcaagtagaagttgattatgagtatctacttttgtacttccaagtttgggcatttaggaatgtagttaactagtgtttctaagaagaaatttattttcaagtaccatatagcttgatttttaaaaaagtgtgtatataaaaaaagttatttctattttctgttttagcgtgaaaagtaggtaaaagtgtggttaaattctgaaatatgacggtaaagtaatggatgttgtgaaactaggcctttaaaggtgacaagcaatttgaaaaaccagttgtttagaccagtcttagttcatatttatagaagagtctctggaataaaaagattttaaaagtcctgttacacccatatcagatagcatcaagagagttttattcacttctggaaaacacagtattcaaaggctgtaatgtgaaaggacatagccgcaaaggagagaccaaggctgcagtcccaggtagcctcatttcagtgtgaggaagacctctgacaatggaaaaagaaatggattgcctgtgagatggtgaggtctatatccacctccaccctgccccccctgcaatgagaactttgaggtagatgaggagaaggggtcatgtgtttggtgagtgagctctcttgtgagtgggaaaatggttgaagccctttggtttcacttgataattagattttaaaggttggtatttcagttaggtaaaagactgaagtgccaatacatgaatggtaaagccgcatactgtataatgtagaggagcttaggaaaaaaatgaaactttgtagacactttttatgccttgggtatacaggaagaagaaatctgaggaaagaaatctgtgcaatacataagtattttgtggttactttaggaacgctaattacgtctcgtgcccttttcccagaaggtgttcacagttggcatagattatgaaagccctgggataatacttttcctgaaatcttctcattggcgttcaggaatttttacatgaagaattaaaggttaatggcttaataactaattcacttgctaaatgattccattgcatgtacaataagatagcatttatatatatatatcttcatatgtttttctaataggaataaagaagatagctattttggaaatcttaagttcttattaaaacaaacagtaatttttatgtttaatactcaacgcagattatattttacatttagataactcattgaaatagtactttggtagggtaaggagttttgtgtaatctgagtttgagttctgacttggtttaatttgaatatagaaaagtataatcagttcctaaaatgtagaaaacagttggttttctggtagagtgatgaagagtttttctctaaatgcaagccttttttgattagaacacctggcaaaagttttgtatttgttctagagttctattcaagttaggatgttctgaaagtaatgcctatgaagtgcctgtattttagataccctttggagatggagggtgctaataaactgaagtatgagtcaggtcaaccctaggtccttgtagtttgcttggcaagcatttgataactaggaaatagtgaagtttctgctgtgtgttggtgggagacatcagttcaaacggaaacatctagctgtcaagtggtcttttttttcttcccatgggccctccctaaacagcttagccttgtatctttaataatctctctttgtgttttatctgcttgaaaccaggcaacttaaaatagttacctagtaatggaagacttgaccctgtgaacaatgttatactttcatttggtattaaattttcttgggttacagcttattgccgcagcaagctattgaagaaggaaggagtcctgttcctgcccctgagctacagctaaggtacaaggaatggcttgggggtaaggagtccttcctcaccagatatggtttgtatgtatgaagactgcttgtcagaagttgacattttgcactaattttttttcttaattcatgactcacacattcaatactgatgtttctagattttaaaaatctaggttatatctagtattatatgcagactattgaatcttctaaccttttagattataaaatcagtttcaaaaaattaagagttcaaaagcaatgacgggaaaattctgaagtaatatttttcatctagtgcctttgctgtgtttgtactactacatgtttaactcatctaaaagaaacctggaataccataatggggtttaacatgaaggtggaaggaagggtagagaacaaatgataaaatactgtgtgattactcatgttataaaaagttgttgcaatttgattatcagacttttcctatttaatgttcttagctttgtgttagaatttccaatatactcatgagtttatctgtttttagtggaaggcaatatttttaagacgtgttatcaacacatgtagttacctcttaggggaatccttacttaaggaattagtcaaatgaatgtctggtaagttatcaatttgtctaaaggaagaactacccttgggtttggaaagtgacagttaattcagcctcttatcctttttgttgctttgaaattagagcaagagttggcagcctgtggcttccgggccagatctgacctgtcacctatatttttgtggcttgtgaagtaggaaaagattttacagttgaataggtggggaaaaaaacagcaatactttatggcacttgaatttcataaaactttcacatttcagagtccataagtaaagttacattggaacatgaccctgttcttttgtttatatttattatctagtcctttacagaagaaatgtgccagcccctgatttagagtatatagacacaattttctaggtgcatcatttttcttggcttcttatgctgctgttttctgatgttactcccttgatttctcccttcttcttctttctgtttttttgagacagagtcttgctgtgttgcctaggctggagtgcagtggcacgatctcggctcactgcaacctctgcctcctgggttcaagcgattctcatgtctcagcctcccaagtagctgggattacaggcatgcgccaccagacccagctaatttttttttttttttttttttttttttttttagtagagatggggtttcaccatgttggccaggatggtctcaatctgacctcgtgatctgcccgctttggtctcccaaagtgctgggattacaggccctcttctctttatgtacaattccattaaccttcatgtggatgatttgccaccttttttaacaagctgacaactctggcattttctgttctcttctgtgctggttatggcctcctgggtatccccttggcactgcaaactcagtgtggttaagaacttaatgtgttgcctatccccaaagttgcctctgttattgcttatttctgtttatcgcttctctgtcttctgtcatctggggctgaacaaatgcagttctttcttttcctgcagtctcaatgccatatagtcttctctgccctagttgaactgctcatgttgtttgtttcttccttggactcttgcagtttcttagctggtctcctgacatactactgaggggaggatagctaatacctgtaaatacgcttgtagtgcaaatatatgtccttgagatactttaaaacacctaaataggtgcacttataacaaggaaatagtagaaagcattaagtgatggctttctgattcccatactaattgattgtatcaacacttgccaaattactgcatacttctcattttcaaatacatgcaggatgaagtcacatccaaggctgtctcagtatgactcccaacttatttttttaacctcatctttcagtttttttccacattttatatgcccagtaaacaaagttgtgcagattcttataaataccattaccttttattttctttggtgccggcatcatgctgtttttctgtttggaacaccctccctttccacaataccccaccacctccatgaaaaaccagtctcatgttcttccaagttcatcttaactcatttggtacattaaacaaatatcaagggcctgcaacattaggagtataatagactaatctttcctttggttgcatgaatctcatcacgtctcccatcacatggatcactttctactttgtattacagttaattggtgaatatgttttacctcctttgctagattacaaattcttgagagctgagtctttcatgtttgttctgctatgctttgcatatatggtagatacttactaagctgccttgaggggttactactctcatctctataaaacagttatttgctatgatacagcgtgttgacctcgtgctagtagtttgcttacaagtcagtgcacttcgctcacgctgggtgagttgtatgttaccagaagttgtgttgatttccaagactgttttatgacaggtaatcttgtttccgtaaaataatttaaatatcatgtgagctgatgaaatgagtgcaaacctttgtttcctgaaaaccaagttggattctttgggaagacttgataaaaggtgagtcattaaaataatgactgtagaattagatatggctgaaataactcaaagtttgggaagaaaaataactaggaggattgtgtatgtggagtgttttacaaggatcttttaaactttccactttaatgaagctgaaactggaaattgtagataatgccatctgtagatgtcgcttagatcaagcagaaggaactcaaatcatcagggaactccaggtcatcgattccattctccaagtgcttgtcatgacccctatattgaggttggcaaataaatgtatgtttatgtgttgaataaaatacttaataaaatacttaaggtacgtatatatagttttatgactggatatggctttgggtatgaaggcttctgctttatagaaaaatgctgatttttttgttttctattataaatgagtagaaaaaccttgtaagatctgaaatgaagatactggatgtgttaccatagaataaacaaagactggcattgggagactagaaggagctttagaggcagatgggactgggttttggattgtagcacctacttcctaaggactttaaccttctggatcctcagttccttctttgtaaaatggaagtaattcatttgggagggtatttgaagataaagtggttatgtgaccttggaggtagttaagtgtagttctgtcattaaagtagctttgtggtcttaggcaagtcgctgtgaacttcattgcctagtttttcattattcccagtttattaatgaagaaactctaaaagataaaacttattatatctaagtttatttcatcagaatcccaaactagatcaaagctgaaatacagttcttgttaagtaaatgtttgaattagtggtgttggtgcttactactctgctcccatctattattgccatgaggggtgtgggcctggttttgccagctttttttttctctcttcctcctaccagccagaaatccagattttataggaaatctggtttttttttttttgatgttgccaactaattgaatacttaggtaccatggatcaaatgtaatgtatctgtgggttaggttggctctcattttgtaatctagatattcagataattagctgtaggttgtctgtaaatctcttagcatttatgttgacaaagcccaccttgttaattggtcactggtttgcagtaggactgatttcagcaatggcaggcatattcaattcttgaaagtatctatagtttcggattgttgggttgtatatgtgcatttaggctaaaatatacatgtaggcttcagagctgcaccgtgtaaactgtgagggagtgacattcacagtccactttttctttcaatgtctgagtgatatcttgttttaggcatgtattagtactatttggtttgtacccgttgtattaacctcttaggtgtttgaaatactactggcatgcaaagattgctttgcctagaaaatatttttttttgctcagagtgtatctgtggaattaaaaatagtttacccatgatccctggaaaatagtattaccatgaaaaaaattcaggtgctctcttggtaaagattatagaggagggaggtgatgacatttttatttttgaccaggctttgtgtttccataaaatagaagccaagttattaccttgactaaccttctttttttgtcttttttttcactcccactccagatagataacatcaaattgcaaataaaacgaactcagatcccaggttgttcttacgtacgttttggcccaaggtgtaattgacttgttttgcttccccttgcaatcatttttactatgattacagtcccaggtaaggtaatttctgtccactttgggcatacctcagtagaggttggtgtagatgaaagcttaaaaatgaaattgcaagtgaaagcacagacttagcaaaactttctttattggagccctcaatcctcataaactggcatttttctgcttctgccccagaatcgagaattcctggttttgtctttgttttgacttgagtttttaaaagtttctctgtaacacctaccctggagtggttaagtgctttaattttgtcaggtgaagaaaccaagtgcagttatggtagccgggttgctgtggatataatccagtttgagaaaattctcattgtggtgatcagaagtgcagtgttgtggttgcatttcagctgctgggaagatgctcttgcaaatccatgtgtcgtctttgcttccgttagaaaggtgcagaatcagtgtaagttccagatatctgctcccttttcattttgtgctcagatgccccgtgtatgaattccgaatataaaacatctgttcagtctggttttgattcagatttaaggtgaatttctgttgctcagttgaaaagctaaatttgagtgtaggctctgtcaggcatgttgtaggaaaggtgtatggtactgaagtgtgtggttttgttttttaactgcttgacactgttaagtaagcaaatgacccagtcatgggttgttttgattgccattcttctgttggtgtactgcttgccttctgttttgttaatagtcatatgagaaaacagttgtatgaagtatagtatcttgaagctttaagacaccaagtttccattaggcagcctaagtctcgcagactttggtagcactgttggtctcatgggaatgccattctcatgtgtggactaagtaagggccaggagattttgcaaattttgtgtgtgtaagaagattgaagaaaacatttttcctaatgtcactgtcttgagtattttatctgattaggatggactcattggaaactattgataatttcaagatttcttgtcatctggcatacaaagaaaacagtcgtgaccctatttccctggatttttctatccctctacttgtcctgtgtttgcaatgcaagaggaaaatccagctgcctttataatctagaataccatgtttctgtttttatttcttaggtttaattcagggcgtaatttctaccagtccctccaaatactgttaaagttactctttttgtggtcttacttcttacttcttgagtgttatattctccaaaccttggagaaaattagaaggttttaaagttttccaactgaaaagtatctttcagaggaaataccctaatttctgaatcttctatttataacttggcctggagaattataatctggtctaccaggaaggtgcttgtgcttaggttttctgccttagtcacatggaaagatgagcagaagcgatttccttctagaaacagtttttttctagaaacataaaattggaaccaagtagactgagaacagaaaaaaaacacaaagttgacctggtaggatgttttacctctataaacctcatagttgctagcctttgagggaggctagatgagttgataataatgcctaaccttagcaatggattgaagtaggggtgcaggggttatgtaggtgtgtatatgtatttaggatatatatacacacctacatattatacacacacacatatgtacaattctcttgaatcctcagccatctaaggttaggtagagctatttccattttacaaatggaaaaactgaagaattaaaacacagacttggtcatacgtaatggtaaatacagtagtttaatgaaattttgtattgtacctatcactcagcttcaactgttaatttccagtctgctcacctctgttttctttatcttaaaatttttttcattaatttcccttggctaacatgactaaaaaaatttcagacttaaagagcagttcatttaacacttgtatgatttttgcctagatcactaattgttagaatatgccttattttatctttttttaatctgcgttattttgagagttgcagacatcttgacatacctttcttaggaataagggccttcctcctaaccacaacatagtcatcacattcaaaacggacattgatacgatactaccaccaaatattcaattcatatagaaatttacgctgttcttccagtaatagtttttagtgttttaattcagtattcaatcaaggatcatatatttacttgtttagtctccttgaacagttccaaagcctttgtcattaataacagtggcactttgaggagttttggagtccaggcctactgttttgcagaaaccctcactttggagttgactgtagttgcgttttcatgattagagttagattagccattgttgacaggaatgagtatttcatagggatgtcaatgcatcacaccgggaggcataccactttgttaagcagtcatttggttaggtggcattcaccagaatgggccattgtaaatgtaccctatttcccttttgtattaagtgatctatggaataacaaacttgagactgaatattttgttttccaacaatctgcattggttttagcatctgttggtgactgaatcagttattgcaggagtactttaaagcaaacttagatatatcatttcacctgtaagtaattagtgtataagaaataaggacttttttttttttttttttgagactgagtctcgctctttcgcccaagctggagtgccagtggcgtgatctcggctcactgcaagctctgcctcccgggtttcacgccattctcctgcctcagccccagctgggactgggactacaggcgcccgccaccgcacccagctaattttttgtagttttagtagagacggggtttcaccgtgttagctagggtggtcttgatgtcctgacctcgtgattcacccgcctcggcctcccaaagtgctgggattacaggtgtgagccactgcgcccggccagaaataaggacttttaaacaaccgtagtgcctttacacctaactacaattccttaacacctcatgttcatgttcaaattccctgaattgtcaaaagtgtctgtctacagttctggttgactctgaatctaaacaaggtccacaaattatgtttgcttaatgaccttaagtctcttactctgtaatagcttcttaccccactctttacctttccggatttggctggtcacttatgctgtttatatatattcttctattccaggtaatttctgtagacccataggttctagaaatttgattagattcaggttttgttttgttttgttttgtaagagcacttaagtggtcttgggagggatagatcacatcaagagggacacatgtctgcattttagagaaaagattaattcttggtgtgggtacagatgttagcagctgcatgcgtccattttgaagtcccccagcagcctttctcctgaaaattgtagcatccctgtactcatagcctgggtgcattacttcagggcttaccggtggtgatttttctcattacattagtccttttgcatcagttagctggattttatctgacttgtgtttatttctagtttgtgtttgtgtgtgtgtgtgtgtgtgtgtgtgtgtgtatcttcctgaaaggtgttgtaaaaggatgcgttcttcatctttatttcagaaaggatgttcatgaactcccttagtgatcctctcaaatgtcctcagttttctcatttgtaaattggggatcattatcatgtctgcctcttggggtttttgttaggattagatgagctcaaacatgtagtgtaaaaatagtggttggcacatggtgtttggtaaatgctagttactaaggtaacttctttagttttgtgggaactctgaactcaagttgtaatggagaggtggaagaggattcttcatgagttgacatcagggtgcttgggtttctgttgggtgagctgaagggaattgttgcttgccggcactgacctgctctttcagctgtgtgggaacagttgccagacagacacgcacagggaaggtctgcacatatcactgcacactaagaggtggatgtcgacagttgcagcagtaaaacttgaaacacgttccgcagtggagttagcacagtgaagggaagtgggccagactggtggtaggtggtaggttgagggagatggtggctccagatacaggtttttactatgtcatgggccactgagatttttatctgaatgaacatatttgtctagtccagtttgccttgtcattacacataccctcaactggagctatttgagattgcagatcactggtggaggagggaggaggctctttttccctttagcctctttaatctgcatctcttgttgcttaaaaaaccactgttgatggtaatataggatattggaagtttagcagtcttgatggcgaagaacttagttgttaatatttgatttttttatttaacaaacatttgagcacctgtaatatgtaagatggtgttctggacactaggacacatcagggaacaacacagaaaattctaccctcatggagtttacatacatggtagtgaggagacagaagaaacgtttaagttttatagcgtgttaggtgttgagtactatggataaatacaaagttggaagggaggcattgagatggtcagggaagttacttttgtgcaaagacgtaaaaggagaggagacaggtcttgtggaaacctggggttacaaagtgttgcctgcataggaaatagccagtcccagaggctagtttggtccattgtgatgaaagggttgactgcttgctgtgctagtgccctgtagtgggccaagggcagaagcatggagacaagaggctgggacagtgatctggatgagatggaatggtgatttgaactaaggtgctagtagttgtctttgattctggatatattttaagtatcgccaacaggctttgctgatggattgattgcatgtgggttgagggagaaagtgagcagtcaaggatgactaaaatttttggactgagcaatagtgaggatgaagttgctgttctgagatggggaggattgagagtagaacacattttttgggcaagagcaaattattcataccccggaacaacaggcaactacaacacttcatccattaagagcagttgtccataaattttactgtgagaacccttgcatttgtagattgtacagctaattcctttaacttaatgttttaaagttgtgggagttgataaagattggcttagatagaatctatagctgtgatgactgggtcaagtatagaatacacttaagacttactatttttccccttctggtggaatgactaattaacactgataaaaagaatgaaggcagaaagcgttgaacttggatggtgagaacatagatacgtctggtcttacagctgacccatcagggctttgctgtatgtgaagcctatgcctgggacttctttttacttttaatctctgcattttatccatacacatccattcacatgatcacacaaagatttcaactggtttttatcttacgtgctgtttgcagtcttactttgttaacagttgttacatatccatcttgtgtattttcaagcacaactttttaaacacgcatgatcttttatcaatatcgttaatgtttcttcctgtcagtaatgtccttttcactgaaggtagtattgcatagtgattaagggcaaaagctgtttagacatatagatgtgaggcaacatcctggctgtaacacagacagctgtggcctggggtgagttatactacctcatggcttcagttttctcatctgtaaaatggtcataataattgtacttatctcatgattgttataaggattaaagtaatgcacataaaactagacacagtacctagatggtgttaggacttaggttagtgtaagatttttttttttttttaaatttccattatttataactcacttatctttgataaacagtcttttacaagcagatagtgttgagcctcttgaattcttattgagttacacaaatgtttggttaagattacatagtaataggcattgctgctctgttatttcatatttccttttctttttgagacagtctcgctctgttgcccaggctggagtgcagaggtgtgatctcggctcactgcaacctccacctctctgggttcaagcgatcctcttgccacagcctcctgagtagctgggattacaggcgtgtgctaccacacctggctgatttttgtgtttttttagagatgaggtttggccaggcaggtctcgaactcctggcctcaagtgatccacccgccttggcctcccaaagtgctgggattacaggtgtgagtcaccacgcccagcctgttatttcatgttttcatttatctttaacaaaatgggttgttgggagtttgctcctatatgtgatctagtatcattcacataaaagttaaaaccagtagtagtttcatagttgttcttccctccctgactgccatatctacaaggtcttatttctctgagatttctataaaaaaattcatgatgagccaaacttattggtagaatcaggttaaaatgaatatatcttgggcggagtgtatatggatgaagtaaatctggtggtttatgaacttttctaggtgaataagattttatttgaggaaatggtttactttggaaattatccattcttaacccctccccactcctgtcccgggagaaactgataaaagtagagctgttctggtggtagagggttgggaggagggccgcagtccctccctactctgcctcaacttcacccatcagaatacagcttcagcaccatttgagtccaatcagggttttgtataattaataacttttaaaaacttgagggtgcaagtttaatagaaatgttttgtcaaaaagatttaagggcaaattctttatattttagggatggttaaaacattacggtacaggttgaatatcccgtatcttaaatgcttgggaccagaagtgttttggattgtgggatattgcatattacttggtggctgagcatcccatatctgaacatcccaaacccaaaatgctccagtgagcatttcctttgagcatcatgtcagttctcaaaaagttttggatttgggaggagcatttcagattttgtatttttgcattagggatacttaatctgtagtgttgtctttagctccacttacaatttaaaactggctggagttcaggccagttatattaggaaaacctgttttgctctttgtgttactgatgaaccgctacagtatccttgctccacatttttaaagtaagcaggggttgaggacagtcctatgtgagtacacatacactctgcatcaagcgttagtagtctattccaccacaggaatttgctttcctagaacttgagtcaaggtgacaaaagtgaaagcatgtatgtaaagtcttaagaattttatatacattttttctttttgtattttacttgaagtgatttaagtaggagctaatagttgatgagacagttgggagtctaaaatgtttgagagagctgcatctttaatgcattattttatctaatctttctatatataaataacttgggaaaatcctaatatgccttgcacatagttgacagtttaatttgaaaggaactaatatcacttctagtatattcaggttgtagggagtaaactgacatttactgagccacctccccattgcactgggcaatactagctttctctgttacttattccttataaatcataaggagcaagttggtttcattttaaaagccagacagttgagacttgttgaggctcatagagatgaagttgttgcctgagatcctacagttaggaagtgacggagcatggaacccagcccttaaaaactgtgctgttttcttctgtaccgtgccacctacatagatgtggtacctacacccacctcccttcttacagaatcatgaaatctgtctgttggggtggggagaaaacaagcttgggtatgcccatgttttttgtttttggtaggttacacaaaagtgattgtaattcaggtaattagttttcagaggtgtctgtgtgttctataacccttcaattattagctggctaagtgaatatttttcatttggatcagaggatgagcagggctcatcaagcttaccattgacagagtgctggactaggcgtctcagattgtaccttgagtgtgtggtttgtaaattgactccaaagctaaaagaggtggttgtttggtcacgtttaagattattgcgtactactctttgcaggccccgccctgtgtcattgaacttatgacttgaagccctgagtataggagataatttttcttgttccttgtttggttttagtggcaggtggttttttattttattatttttttgatagagtgcccatatatcctgctgtttacatatagttccagaataagtttctggtttggaagataaattatatggtcacccagacagtactagagagatctggtcatgataactaattacattttggttaacatggttatatcacctgaaggagtgcttatttaaatttggtcttacctttttttctctttctatttggtcaaatgcagcaaatatttatatttacacttctctatttggattaattcttcagttgcaatttaatttatccagatgcgtggaatagaaccaaaactgcattctaattctgtgcaaaacaataaaatactactttctgagaaggatgccttctcttttgggaagaaggggaatctgctctgtttcaaagcacctttgtgttcaaggtttggctaaatctgctcatcaccactaggggactgtttctttttgcattctacaagtattactcccattacagaagctttttaagaaaaaaatggactaccaaggaacccacctacatgcttttcataactatacctattttattgtcttataattttacttgagaggtttgcgtgaatgatgaactgtgacaaaaagcatatataaatataaaaatacaagttaaaaagcctcatgttagctgaagattcttccatgtgtattcttataaaaataagggaaccctggacagtgctcattgtattttgttgaagaaatgttaacttctttaaaaggaagaaaaacatatatatatatataacatactgtatattcagaaccatttttaaggaatgtagtttatctcttgaaagactgaaattcaaggctgtgactgtgactagagtgtaaaatatagctgcattgcattatagtattttatatatttctacaaaccaaattgacctgtttttggttttgtttttccttttccagtctttaccaggtgctggtctctgcatgtgttttgtttaagttggaaaaatctagacacgacccacagagtggtatggtatccagtgagaagggaactgtccgcagtggctttgaaggatatgaggaagcctaggcggagagttgagaattcagccttgagctagtgttagggtactatttggtacctctcctgtgggcagagcgactttactagagaagttaggagttagggctagcatgagaacttcatgcagtttgagcattcatcaggcagcagaatatagcttctatatttaccttgcataaatcagatttgacaatgaagaacaatgttactgatagtaacagtgcttcccagtgattgaggaagtgcttgttttctttttcagcactttgttctctgaacaaataagctgcagcagctactatgacacataacccaccctatttcccccccaacggccagatgaaaccagaaatacccactgtgtttttctctcccttctttggaaagcacgtggttgctactgccattgggaagagtgatacctgattagccaggtagccttctgaaaattgaaacaagtggcctgaggatgacttggatggctgttgggtagcagagagccctggaggcagggtttcataactgcgaacagcagttttcattgtaattgacacagcagttttcattgtaattgacaagcttcccttatgcagaaacatttaacgatacctttttaaataatgtttactagtcatctgattagattttattaaaaatttagatgattcgtcctacataatgtcaaagcatttgtttaaaaacttggaagcttttgggggtggggaaggtggtcatagaaatatgatcatcttcaggatttggcaggtatgaagtgatacaaacctcaacttttaagatttttttttttttttttgcttttctctggcaatcaatcttatttatgccagccgttgacacttagaaaggatttaaatcacttttcatagcataattattgtattgcttaatgctttaaaaaggcacgcagatgggattgagacatttctatccaggcagttttttctgcattagacctaagaacctaattttgtagggcagtagtctctaggcattatgtttagctccttttgtcagtgagaagtgtgttgtaaagtttctaatactgtggtctgttttgaacggttttgagaagaggtagctttagtataatttataggacttaaaaggaaaatgcctagaatcatcagaaaaagcatggaaaaacattcttctctgaggttgccttattggaaaaggagaaatcatttagaagttaatgtgtggaaggcattaggttgaataaaattgttgttcgtattgatctgtcagctgcaattacaattaactgaaaatttagtatttgtctctttttcaggagagaagccgtcaaattttaatacatttaattttaggtatatttaaatgtctgttttgcagagtgattatcttaatccagaactgaaaaattcctgatggtcctactgaagatttatctaatggtccacaaatgtctgttttgttgaggtttggcggacataataataaatcattttttagtcttctgaaaacttttctcctcctccctcttttctctgcttcttatacccttcaacaaaaagcattaaaaggaaaacataaaatcacgcctttagtcagtgccgttatcctctcagaggttgttttggaaatactgcctgatgaaaaggaagagaaggaaattgcttcttttaaagtttgctttttatcttcttgcagcatcttctaactggcagaaataatacaatttttgagttgttttgtaagttggatatttttagttttgtgtggaatgtcgtgtttcccattagggcagggggcgtctcacaagatctaggttactgtatgacaactatatccatttactggagtttaagaagctttataacaatacatttccagagactaggcagtacttggttttctgtatttaaattttctgagggtagatgataacatctagtaaacaccacctgcctgttccatccaggaccctaactggccataaagttacccccaaactctcttaggattcatagtattttaagatttcatttttgtgcccttattacgaatataattagtgttttctcccctttagggtgctttaagatcttagtgcctgtcctaatctgagcataccacagtaagacaagaaagggcaatgctgtggtaggcagttagctgctgaagttaggccacttagttatgaggtagatgaatttctgtcctcagctcaaaatgataatattctcactgacaaaagtatcagctgtgatcatatagattgctctttcctgtggaactgaagtgtattaaaaaaattttttttcttccaataaagaatgtctcgttgcgccgggtttgctagactgaaagtttcctcatcacgtggcgagacctcctctacttcaatctttgtcttttgtctctgctgccttgcagggttggtacagtaggcttcactagacttagctgcaactcagaatttctcctccagcacctgagtaaatgctgatggtcttgtggagagtggattaagagtacgagctaagttctcaatcccaattaagaagcggaaaatttaaactgtcttcttcaaagtttatcacaaccaccaccatcaagacagcaaaccaaaggacaaagactttgaccctgctgtgttgctctgtgtagtccagttcacgtatggtttacagacttggctggggttactaaaaataaataaaaagttggacacttctgtcattggagcgctattattcacaagttaccagaatgagagctgtactggacacagcagacattgccatagtggccctgtattttatcctggtcatgtgcattggtttttttgccatgtggaaatctaatagaagcaccgtgagtggatacttcctggcggggcgctctatgacctgggtagcaattggtgcctctctgtttgtgagcaatattgggagtgagcacttcattgggctggcaggatctggagctgcaagtggatttgcagtgggcgcatgggaattcaatgccttactgcttttacaacttctgggatgggttttcatcccaatttacatccggtcaggggtatataccatgcctgaatacttgtccaagcgatttggtggccataggattcaggtctattttgcagccttgtctctgattctctatattttcaccaagctctcggtggatctgtattcgggtgccctttttatccaggagtctttgggttggaatctttatgtgtctgtcatcctgctcattggcatgactgctttgctgactgtcaccggaggccttgttgcagtgatctacacagacactctgcaggctctgctcatgatcattggggcacttacacttatgattattagcataatggagattggcgggtttgaggaagttaagagaaggtacatgttggcctcacccgatgtcacttccatcttattgacatacaacctttccaacacaaattcttgtaatgtctcccctaagaaagaagccctgaaaatgctgcggaatccaacagatgaagatgttccttggcctggattcattcttgggcagaccccagcttcagtatggtactggtgtgctgaccaagtcatcgtgcagagggtccttgcagccaaaaacattgctcatgccaaaggctctactcttatggctggcttcttaaagctcctgccaatgtttatcatagttgtcccaggaatgatttccaggatactgtttactgatgatatagcttgcatcaacccagagcactgcatgctggtgtgtggaagcagagctggttgctccaatattgcttacccacgcctggtgatgaagctggttcctgtgggccttcggggtttaatgatggcagtgatgattgcagctctgatgagtgacttagactctatctttaacagtgccagtaccatattcaccctcgatgtgtacaaacttatccgcaagagcgcaagctcccgggagttaatgattgtggggaggatatttgtggcatttatggtggtgatcagcatagcatgggtgccaatcatcgtggagatgcaaggaggccagatgtacctttacattcaggaggtagcagattacctgacacccccagtggcagccttgttcctgctggcaattttctggaagcgctgcaatgaacaaggggctttctatggtggaatggctggctttgttcttggagcagtccgtttgatactggcctttgcctaccgtgccccagaatgtgaccaacctgataataggccgggcttcatcaaagacatccattatatgtatgtggccacaggattgttttgggtcacgggactcattactgtaattgtgagccttctcacaccacctcccacaaaggaacagattcgaaccaccaccttttggtctaagaagaacctggtggtgaaggagaactgctccccaaaagaggaaccatacaaaatgcaagaaaagagcattctgagatgcagtgagaataatgagaccatcaaccacatcattcccaacgggaaatctgaagacagcattaagggccttcagcctgaagatgttaatctgttggtaacctgcagagaggagggcaacccagtggcatccttaggtcattcagaggcagaaacaccagttgacgcttactccaatgggcaagcagctctcatgggtgagaaagagagaaagaaagaaacggatgatggaggtcggtactggaagttcatagactggttttgtggctttaaaagtaagagcctcagcaagaggagtctcagagacctgatggaagaggaggctgtttgtttacagatgctagaagagactcggcaagttaaagtaatactaaatattggactttttgctgtgtgttcacttggaattttcatgtttgtttatttctccttatgaacttaaggatatggtgagacactaacttaagacaatactgactggtctttggggaaaaaagttatgtaactgtgcatctctcaggcattgtttacgctgtaggttttagccaaattttacttagcagaaaatcatctaattacaagactttattttcccagagatggattaaagtaaatcttcaacttaagtgaagccaaacctaacagactgaattgtgcaaatgtggttttaaattttgcataccaaagtaagaagagaccaattattctcacagagcacttagagcagaatatatgttaagttaccatgaattaaggtatactgtctgcactgccaagtcttggcagaccttaccctgaagtagaagatttgctcatttctaaatttttttttctgtctctgtaatccctcctaccattaagaaaaacttatttcttagacattgtacaatcagttatgtactgaaaatcgaatgtgcttgtgtgatacttgtttcaggacaagttcatttgccaggttcattttgttagcatgagcctacggattctgatttcccaaagaaagaatgttttcctgtaggtatttttgtaccaccagtatatggaatgttagggaaaaactttgttccagttcctttttttttttctttctactttcaagtttaagtgaaccatactgaaatgaccaacaagtctgcctgtaaagttacatgtcatgattgtgttgttaaatgattatgggggagaaaatgaagtaaatgttgctgatgatccccatatttattgatcatattaaggttgtttatatagtttggaaatgaccagccccctaagcagtgtttgattaacttatgctaatcagatgattactcatatattctgctaattttctagctttattcttgttatttggaaaaattattagccaaatgccttcctaggtggatccagttggaagatatgtccagaaacctgaagaaaaattgacgctgcctttgtgtgctggattgctctacttgattagatcatgatatatcaaggttgaatttttagagggaaaatttaattctgatatcttattgcatccttgataagtttttccctgattttttttttcctcaaaagactttccatctgtacacagcctctacatttttgttgtagtgacttagagcataaggatgtttcagtgcaaactggccgtcggtaacagaaaactcagtgcatactttgctgttgttaggttgtcaatatagtctttctgtaggatggatagcatgtttgagaggtgccaaacaagaacttttggggttagtagtgtgtcttgtggagggtattacaggactgtgtaattataggactctaacttgacatggcttggcacccacttgcagctagtgggtacagggtacaaaagatgttagagaaaagctctacagattacgtacttctgtgtcttcgtatgctcaacactgtcctttgtcctccatgaaagatgaaggaagcaaattatgtatgtactttctttgaccttctttaatctctgatactttttagattgcatgattttactaggcttgtatttagggaaattactttcataaatacttttgtagattttgaatcaaaactcagtctttttaatttttttgtagtctataaactagtttcattatgatggacttgattagtccaaagttaattttagaaattgtcaggtagcatagtgtcttcccatgatcaggaggctttctgaaggactgagtctgtaaatgaaaaaataatttatgtatgaatagcatgtatttctgaagagcttagagtgccttgtagaatttttttctcaattttattcttgaggtttataatttgggggccaaatagatagagctcatcattttcttgtttggaagttgaggctgcgacatgtccaaggttatgaagtctcttttgggaagaacagaaaccaggtctccaaatctggactcatggtttgttcagatgtgtctggacaaatggttgtcaatgttttgtcctgttttttcaaaggaactgttcttcctttgggacaaccttttggtgtttgggaaagtaataagatcttggatttttcaaattaacattaagttgtaagaactaaaattttctttgaaccacattactgtgtaattcactgataattgacatattggctgggcagcctatctcttccatatccagcgtaaatgaataggaggtgtttgtgattttttttttctccctttatttaacattgagtcctagtagtttggagaattagggtccctctaccttctttctgctcttgtcttagtaagatacataaggtacatcatcttgtgtctgtgtgtatatagcagtaggtcaagtttagagtactaaagtctgtaaataaggaatgactattagcatattcattagaattgtttattcttgccagtataaacatcattttatttagactaaagtccctgaagcttgtctttcttattgcttcccagtaatagataatgtgctcgagtaagtttgtgaattgctgattgcaacttaattcagggaccagtcttcaatctatatttcattagaatgattgttcctggaatgatcatacatggactgtcttaagctagcaaaatgttcatactttacactgactaaatgggtcctaaatgatgacattggtctttagacattaacatgtgtatatttttatattagctcaagctaaggttcagaattgaagcttgatattgactagaatagctaaaagtcaaaatgaggtgaggacactggtcttggaaggtagagaaaaataaatgtcttaccaggtgttaatggtatccccagttcttagacttttgtcttctcaggcaattttcatctcaagatctgatgagaagggcatattacattggtatgcaggatgattattgcatattttgtgggacctctaatttccctggtcatctttcagaatattctgttctgccacccccagagagtaaacacttgagccgatttcttcttccccagctattctttcctgggggtaattatgctttgtctttagattagagaagcatcaagcaatagcaatggtgctgtgtccttcggcctaaattcaatagatctcatctcctagggcttccttttcacttggctcaaaggatccattgtattttggcacaaagagcctggccagggtcatgtagccatagctcttagggatgatacctcaagaaattagctgggacccatcactctgtgaaacttcacattttaagaactgagttgagggggttgttatgcacttctgtaacttgaggctaagcaaggggttaactcttgtgagagccaatagagtgtgtctgtattcgcagtccatggctcattttctttatagtaggcatatggatcttcccctctgactttgaatatcatttggtgtggcctgtgggttattttcattctttaccaccaaataaagcggcttattagctactcagttacttgctactcaaaggttaggtcttccctgttcctgcttggcagtgttaaagcttacagggttaacttatgatgattctcctggctcattttcatcagaggcatgatgactggaaagggatcacatgggtcgttggtggtgacacctcactgtttcctaggtttggatagagagatgtatacaagacctttcctgttaaattacgtgactacagagacttgccaggacaaaattttcctaagaaatcagaaaaatgattaagtgagataagtacctgggtgacacagatattagcccgttggtaaaagacaacaaatattagcttaaaatctgcatatgtagaatcattttcattagatttagagcttgaagcaccttggctctcagctactttaaactcctccccatataaatcagggcaccaataaataagtttcagctttttaaaccctggtttgatgttaagcattataaagtacgaagtttgttaccacagtagagataatttagtagaaaaatgctttgaggcttcagtatttgtaagattttgcattagccagatgctaggttgttgaaggcatttcagtgttgataatagcctgagcagacttctttacaaatgggatctgtttctatatgtgtatatgcccacttaccattcagagagactggtctttctctttgtcttccttcacattgctgtgtcagttctacacctagtcttttcagcacttagcaaattcaaattttgatttttttgtcagcttagttcactttaaggcatattggcatggtgtgtgaaagtgatgttttgccccagtattgaggacttttagatccaaataatgactcattaaatataattatgttttaagtatactgaatttctgttagcttaaaatgttaattctcaggaatgattttctcacactttgtgttggctaataataaaagcactgttttattctcaaaactcctttttcaaaaattagggagagagcagtagtgatcatttatgtgagcccctttgaaatgatggtgtcagagtgcagagaaacaatggagttttgatgccaaaaaggtttttttgcagtaaaagtaaaaatttggaattagttggcatatagaggaacccttttgtactggaacgtatgaggctggattgtgaaaaggtaatctttcgattgctagacttggttaacttagggctgcaaatctttttcttctgtcaaggtcacttaatatggaatgtttttgtcagactgtcctttgttggaatactttagctgttcagctactttgactcctaggagagaatttagttaaggttcaaagtaattaactggctttgccagtggtgagtcccacaccattattcacttagtagtcatataaatgtttttatttaaacttctctctcttcaatgctgagaataaggctttaaattactgattcacctttaaaggaatgttgtgagaattgatgtaatttctgtttctgtttccatctaaacttctttataaaaagagggattagtttttttgttttggggtaagcacctaatttatccagtaaccaacaaccctaaccattggcatatatagtctttcactcagaaataaacaaaaactgtttggtatatctgtatcattgctaatcttgtgcactttactttttgggcagtaccatacatagtctgaggctattgacttaaaccaataactgtactttatgtaatgactcttaaatttggttacctgggttcacagcttgcttgaagagaaaggatgctagaataaagtaagcagctgaagagcgagcaaatcaagacaaaacacagtggtctcagatttttcgtagtgtgggaacagtggttttgctctataccactgaaaagcactataacataattgttgtccatgatactgaagcttttcccctcacttctaggttgtttacattcagagctctatcaataagaggaatacatattacagtgaattcgacaaccgcacaagttggcagtaggtatccccaacctaatttatcttggtaaattcaccctgtttcctagtgctgctggataaaagagtgtttactttttattgctcttagacagagtagtctagataagttttcaatttatcaacatagcctagacttctgtaagtggaatgttcattagtaactcatctttttgttgttataattggaaacagaaacgaggcttattgctattgcagaaatcccaaactggcaaaggccagtatatatggtattccataatataaccagcttttgaaatttatgtgtttggattagtgccttctggttaccagtattgactctgctagtttgcacctttccgttcttaacagaaaatttgtatttgttattcctcttaaattttgtcgtaactagtgaaggaagtaaaaaaaaaaaaaaaacatgcattacattgacatactttatgtgcagcctttatttaggttcagtgaaaccaggtagttctgtatttgtgttgtagcctaaatgttgtttcttttatatccattaaaaacttaaagttacttatgttctgtgatcttaattttgttgtgtttccattgtaggttgataggtatatcgagaacaggtacgtgacaacagtttatattccatgatagaaagctaaagtccatagaaagcacaaaatcgtgttcacacattagtgtacccacacatagaaagcacaagactaatagtattctctgtatcccacaagtgccagtcataaaggccaccaggtatttgtctcagagttgctatgagcactacagtattgataagcccaagacaatgcggtatctaaactggtcctaatggtaagggacccaaaggaataatctcaataagtttgtaccacattgatggagggagagaatataaatgtcaagaatgccaaaattatatttgggggttactagctaaaatggggtttgagggctttttactgcaacttgaaactggagaaatagggacagatgtctaggtttttggtgggtggaacaggtgacatatttctgttttaagctgtagtgtgattggggttttttgtaaaaaatcttaaatcttttaggaaatattacctcttaacagtgcccccccaaacatgcagaaagtcatactttaacagggcaaatactacttgtctttgattttttttgtgtacgtttgtatgtgagagatgaagttacctttatttttttcctatacttgactgtgcttcattttaataaaggataatttgatctgagtgttctgagcatcagactaattctgaagcatatttgctagaggagctactttgcttttcacaatggggtggagaggattctttcacttgtcccattaaccctcttctagtctagatgagatgaaatctgttaatgtgtgtgtagaagaaaacgtatgttcttctactcagcattgcccttttccacctcctcacttcacctccgagtagcttgtttatcaagaatgaatgaatgtctttgtcttaaattttgcccatgtgttaaaagatgtaattctcagaatgggagagaaatgactacctttgttcctactcttttatataattatccttttagggaaagacttggtcaactctaatatatctagaaggaagactatatctggtgtagactaatatgagatgttttagaagagttaacctgaacactttgagggagagattattcttgccagcaaaaagctagccaggaatgagcctaccacattatttgagaatatcaaacctcaggcctggggggatgaggggaagaagattaccagaagtgcaggaaagagaagtttgaggaacacccttggcttagcaacatgtgataatgcaaagctgttataacctgttaatcctacgtactatgtgttctgtacctttacatgtttttaaatttaagatagtttgtaagaactgtacaaaaaaatgcttctggagatttctttggcagaaatgcctttcatctataatttcatggagaactgctttaattagcctaggtgaaaagtagtcctagcagtgtaaatatgtataattagagttttctaatttcactgtgagatctctaacttttgagtggcaaacagatcaagtcttttgctcatagacttttctgtggggttattaaaatgcaaaagctttattttttttaataatgccatactccattagtgtcagatgatggtatggaatttgttcccttgctttcccccactgttactgcttcagtttatagattgccagcagagttcagaaatagagcagggatttacccgttctttgcttggacatcccattttcttttgtccagacccatgttggcaatcatgtatgaactgtgttatacttctcagtgctttcttttttctttttgataagatggatatcaaaaatagttgctgtgcaaaagttagtagtcttcttcaagaagaaaaccaattctttttctaataatatcctgtgaaattgcttcattcattcatttatttttaagccaaatgtcagcagagtgctgctgcttttatctagtaattttgatatgtaagtattaatgcatttttaaaagatgtctacattgaaacatgttcttcccagtgtcctgcttatgatgctttgttcagattttttgtaagagaccagttagtacactgggggtgtatattgtgtacatgtgtcattttagttaggcattgtaggccaaatgtgattataaatgaagttgatgaacattaattttgttattagtgagttttttgaattgtaaatggatttccagtttaccttctgttgtctacagcttttttaattttaaggtttgactaattgtatccatctcattgtacagtgttttagttgcaagcagaaagtagaatttggtataaagcaggttatttctatattgaaaggagtacagttgaaattgtagatttaagattgttaaaatcatgacaattctaacttgtctattctaacctattgtgtacaatctgattttttaaaattgtaaacatgtatgatcttggtttcatgtgtttttgaaagtgttattgtttaaaaaatgaaaaaagcatatctgctaaagagctgtcagttttcattactgactctgtaaaatacactgttctttgtgtactgtgtgttattttgccagctgctgcattagccttcaaaagtatttggaaacttaagatgaactacatttcttgcaaagtacattcctttctgtggtattttgtcctgtaactgaagtatagtaattattttatggaaatgttagcaattctgtaccaactttgaataaaatgaaaaatttatatttctgtgactaagtattttcagtatgaacactgccacaatgtagtgttctgggtctcagagttgaagaagagtttgtacctcagtttcttttgcccttggcccatgaatggtttccagtgaatttccccctactaatttttgtcatttttaatctttgtaaacactgactcacaggtattgactgagaataggattatgtgtaaaacatagagtaaattaaaatattcttaattttttcacttccaattttgaaatttcaagttataggaaagttgttaagaatggaatgaggaatttaggacttgacttcatccaggctcaccagggattaacatactgcctgccacattggctttgccattcttctgaagcataaatattttttctgaaccatttgagatactatttgcagacattgttcccctttactccctgagtactttgcgtgtatatttcttaagaacagtcactcatagttatcaaactggacagagaaacagtgattttgaatcaaaagactattcagatattcctgggtccagtaatgtctttatagcagcttttcctcccctttcagaagccagttcattgcatttagcttttatgtcttttgccccctttaatctggactacttcttggattttgtctttcacggtattgactttttttttttggcggtggaggggaaatgtgacttgctctgtcgcccaggctggaatgcagtggtgcgatcttggctcactgcagcctctgtctcctgagttcaagcaattctcgtgcctcaacctcttgggtaactgggattacaggcatgcgccaccacacctggctaatttttgtacttttagtagagatatggttttgccatgttggccaggctggtcttgagctcctgacctcaggtgatccacctgcctcagcttcccaaagtgctgggattacaggcgtgagccactgtgcccagccggtattgacatttttaaagtaatacaggccaatcattttgtgactgtccctttttagtttgggtttgtctgttccctcatgattagattcacactatgcatttttggcagaaatacaaaagtgatgctacatccctaaagcctcacattaggaggcattggatgtgttgtcccattatcgatgatactaactttgatcttggttaaggtggtgtccaccaggtttctccagtgttagttactattttttccctttggtaatatgtaattagtggggggatattaaaaaccatgtaaataacctatttctcatcaaacttgaacccctagttttagcattcatttatctatgaatcttgcctgagttgttactgtaatggctattttctagcctttttttgatggggaggatactgtactcaagagcttccccttttcctgttcatttgtcagtatgaactcctggattactttgttcagtgagttattattcattactgtcattattttgcttagatgtttccagatttagctggtttcttttatcaatggtttctttgtcctttgtgacgtttccatcaattcttgagtgctttgcattttccagcacagtaagatgttctggatgcactgtgtcatttccctgcctcagtctggggattgggcatttagtagagtggcttggagtactcactgctgtaggggtatcatgacttctgggccctttcagtgtacagaactaggaaatacacatacagtcacatgtcttataatggtgtttcagtgaacaatggacgacgtatatgatggtggtcctataaaataatggagctgaaaagtttctgtagcctagtgatcttgtaacgtaccgtaacacgttactcctgttgatggtggtgctggtgtaaacaaactctgctgccagggatataaaagtggacagtaatgtcttaagcttttacattcactaaccactcacccaaagcaacttcagtcttgccagctccattcatggtaagtgccctttatgggtataccgttttttatcttttataccatattttgactggaccttttctatgtttagatgctcaagtacttgtcgttgtgcggttacttacagtattccctgcagtaactgcgtgggtttgtagtctaggaacagtaggctacaccacatagcctaggtgtgtagtagggtacgccttctaggtgtgcagaagtacactttatgattgtacaaagcaaaactgcctaacgacgcatttctcagaacatgttcctgttgctaactgtgcacatctacagatgcctccagttctaaaccaacaccagtggtttctttttagccttccctcggtgtttgtatttctcttctccagcagtgagaaatctgataatactgatgcaactcattttgttgaatcctgtaacaccttagaattaatttttgcatggatagagtctttattctacctcgtatttgtttgcaactttggctgaatgtagaattctgggttagaaagcactttccttcagaaatttgaaatcataagaccataggaattttctagcctctagcctctgtgctctaaaatttcagttaggtaccttgacaaaagtttttcttggacagtactggcccttggtgggttctttcagtatggcagctccgtgctgggactgtgattctccctgctctctcctgcttagagccccttttgtttagctcttggacctcctggactggtacacttggtttcatgcctttgctcttaattttcatctctttgctctttctagggcagtttctaaactttatcttccaacccttctgttgaaaaagaataaaatttctgttgagtttttcaattttaagagctcttttgttcctgaaatctttttttatagtctcttattcttgtcttatatcttgtatcttctcatctctgaaggtactgtcgtcttccactcccgctttatttacttcaagatagttttttttctgtgttaatcttccatgttaaaggcttttctccgatatatgctgatctgcttatttttaatagggtggagcacgctggcatcacgattgggcctgcaacggcctggctgtttgttgggttaagtcctgcgatatctttagaataagtcaagctttccaaagaaagttttgagttttaaactgaaggataaaaggccttttgccatgactgtgagagccaagtggggaaagaacacaggggccccatcattcacagcctgcattttttccttaatctctttggtacagtactaccatttagagctgtgcctgtgccctccaatgcagagccctcttttttatctgccgcagagtataaaccttcaaatatgcatctcaggatccaactagtccttaaacttttgaccaattgtatttattttagtgtcacttcacccccacttcccagaggtgcccagtgttggtatggttgattcttagtttttcccattgttgattttctgcttctacttcctttcttccagaatgttattgctaatgtttcttctcgtattcttgtaaggttgtacctgaaaaaaaaaaatcctgcacaatatgtgcatcaaaacatcacattgtttaccttgaatatatatcatttttatttgacaatcatacctccataaagctgaaaaaaatctctttacagtagttctagtaggttttcaggtgggagcataattaggtgcttgtgttgaatcctctggcttgcctggaaattctggtactcaccctttaaccttttgaaggttgaaatttcagagcctattgcccatttctgcccttccctgagataacatgttgcctaccagaagcacagttggagttttaaagttctgcttatttctaagtgctaagcgatgaaaattgttcacatttcaaaggggccttaaaagctgcgtagttggctgggcacagtggctcatgcctgtaattccagcacttttgggaggctgaggctggtggatcacttgagcccaggagttcgagaccagcttgggcaacataacgaaaccccatatctacaaaatacacaaaagttagccacatgtgcagatgcacacctgtagtcccagctactcaagaggccagctactcaagaggccgaggcagaaggattgcttgagcctgggaggtcgaggctacagtgagctactattgtgccactgtactccagcctaggcggcaacagagtgagatcctgtctcattaaaaagaaaaaaaaaaggctgtataggtgattcttttatacaatgtgtattgaataccactcatcaaagctattttattgtgagttttaacatattccataaaatgacacatgtatggtgtagtaaacagttatttgtggtagttatgttttgtaaatttacctcaaacactgcatgagtgaattctgaatcgttgccccttgcgttagattccttccagtgtatggtcatgtcatttttgtcaatacgtgtttgtcaatcaatacatgaccttgcctcatgtgtgtttctgtttaaagacaacatagttactaattgttgataacattgctaacagtgataacattgtgctcaagaccgatagcgctagaactcatgcctgcattgtgctagataagcttcaattttcttcctaaggcacatcacatccttacgcttaggaacactagacagcccttcagcactgcacttgggagccattttaaacaacgaaatgacccccagaaagcacacatgcaaaaaaacatggtactaaatagacagccaaaggacccttgtttatgatatgtgagctgaaacaagggcgaaacattgcctttgtctgcctcagctgggaatgtgtgcaataggggactgcagttttccaccatgctgtgcatgtgtgcatatctacagatgactgcagtattgttgggggtattgatttgggggctacaaataaattttagcaagtaggcaaattggcatatatggattccatgattaatgagaatcacttggaattgtgaagcaaatacctatgtaaccaccacccataagaaatagaacattaccagcaccaccacccgcttcctgccaaggaggctcattccactttcagaaagttctaaactttaaaggattttctgattgaccttaaatctgtctctggcttttactcccaagttctacctctgaagtgttatcccctcccccacttctatttgaagagaaatgttgaagataaatgtattctgaagtctcaaaatcagacatcatgttcttcactctctgggtgtatagcacagggcatagatttcagacccttcaccatcttgctcttctgttttttcctctggataactttgaggcagttgaggttccttttcatatgtggcctccatgtttcagtaattgaggagagacactgctaataatgcaacaaaatgagagccaccattccctagggcttgcccccttccaagtctaatttgggatctcactggcataccctaaggtaggccccctgtaaagtcctgttgtctcttcataggagtttctgactctctttccagctttccatggcttttcagagttgaggtttttttttttttttgttgctgtattgttccccatatgcttcaggagttgaacatccatttggttttgtattttaatcccaagaatttttagaagtttggatgcactgttaagtgtttctgcctgtgccttagatgttgtttctgtcttttgtcttatttctagttcttttactctgcatctctccttttgactagtgggatgtgcattaacttcattatgcatctctgtctttcaaaaaatactctgttttcctctttgcagtgaagatcttttaaattttatgactcagtataatcttttcttcctttctagttatattaagtacagttagcaacttttatttctcaattctccatttattctttgactagtcatcaaacatttattgaacgtgtattgtaagccaagttctttggacctccagcatctaataaccatgagtaagaagcaatttgaagaggtttaagaatagggacagactcctatataattacacttgcaagatgtatgtggaatgcgagcgatacctatggggttacagaagaaagacacgtttatagaaagtagctggatcttttcaaaaaaacagtttgagataaatttcatgtatcttacaattcacccatttgaagtgtacaatccagtggtttttaaagttgtgcaaccatcaccacagtcagttttagaacattcataatcattagttgtcactccccaattctccctccccacacctattctctccccactatcccctggctcagacaattacttacctactttctgtctgtatttgtctattctggacactttaaaaaatattcctctgtctatgattatatatcatttgactggcagctcccaatcccccctccccataaccacctaagcctctggtaaccaccattctactctctatgagatcaactttttaaaatgtcatgagtgagattatacagtatttgtctttctttgcctgtcttatttcatttaacataattcagagaaacacaaaaccactgagggttttgtgggtgcggtggctcattcctataatccagcactttgggaggctgaggtgggtggatcgcttgacgtcaggagtttgagaccaggctggccaacatggtgaaaccctgtctctatcaaaaacaaacaaatgaacaacaacaacaacaaaaaaccacattgagatatcacctcatgtctgtcaggatggctattatgaaaaagacaaaatacaaatgttgacgaggatatggagaaaaggaactgttgcacaccgttggtgggaataaattagtacagccattgtggcaaacagtatggagatttctcaaaatattaaaaataggatgaccatatgatccagcagtcttactactggataaatggaataaaatcagcatcgaagaggtgtctgtattcctgtgttcgttgcaacactattcacaatagctgagatgtggatcaacctaagtgtccatcagtggatgaatggataaagtatggcatacatacacaatagaatactcttcagccataaaaaaggaaatcctgtgcaacaacatggatgagcctagaggacattatgtgaagtgaaataagccagacacagaaagacaacatatgatttccctcatatgtggcatctgaaaaagtagctgaatcttgatgcatgtttttattcctataattcctttgtgtttgtgtcctttctcttccctgctctacagaatagagcagtccatcaggtgccttcctcccaccacttgaatttaagcatcactgcagttggcctagttgatggacatgctttttgtctgttgttgagcaaattatgcaaatctgacttttttgtcaaagtccatgtttgtcattctaggaatgtatgattttaagaacttctcttaacccagtccaccaggtgatatttttgctaaaccttacatggatatgtagaagattcattttcttataaaccttttgtctctaccatctaaatctttggttgactgttccctcccctggttttcttgtcactccagtgctgtctcccttctaccctgtgaagaggttgaaatataaggcgaaggcagggaactgaattgtgcatgaaggcatgcaatcaataaggcaggtggctcagtaatgcctacctgattcctgctcccactatccatttcacaagcttaggcatttcctttacttgctgtcatagtaaccaggactcctgccagtcttcccgtttatcttttatctgtgagtgcatctgaagggggatggggagtatagaaatggaaacctctcagcaagaggatcatggactttaaaatgtccttagaatagcaagtagggtaccttcattttggcattgtttctagctgatgcagtagtatttaccacaaatagtcacccactggggttgtcatttttccatttcacattcagacaagactccaatattattggtgagaaagagtgaaacttttatgttccttaaattagtgttggagaagatcattgcttaaaatcttttacaaactgcaattcagccagagtcattcatctttgggaggatgagaagccagctagcttcctactagagtgcggttctcacatttgtttgcacctggggagctttaaaaaaatcttagtgtccaggatttttgaatccttaagccaattgaattgaaatatctgagggtaagatgcagacacctttatttttaaagctcccaggtgattcaagtgctgagaaataccttggtgatttctgcccttttcctttgacttacccaaatcatgaaaggaatgattgattatatgcaagtgagcccccaaatttgtccttaaatgaatgacatctgaatgatattctttgatttgaaacctcagaaattagttgattaaggaacaaaggtacattattattgaactagagattaatgttaaccaaggcacatgactaactaatatatagctgacaactagtaagttcacacaaggttggatctcctataattatgtcttcccttctgctcagtgggttcattttttaaatttattcgctcatagccttttgattccaatgctggtattgatggcttagcaggcacttggtgcaggggccccttggatgggtaagtgtagtttatgacttaaaggcattttgcctaccttgcagctcaagttgctttactcctcagtcatctgctttttacgtttgcaaattcagccatgcattatctcactgagaagataacaatgcctctgccttgttcttgggtccttcgttttggcccaggattaatgtgtgctgaactcagatcagttactggaccagtcattggcttcttgctcctgttttctttttaacctccattcttctctgagttctttttgttttcatcacattgcccaaagagtacttcttaatgttggatttcccaggtctcaagagtcttattcctggctgcatggccatagaatgggcaggctcctgtttccacatcccttggcttcattgaccactgtggtgtcagggccagacttggtcttgtcctatcacgtctttttggtgcactctgattctgggaccagtacttctggattccagtttttcctctcattccccaagagacagagtaaccagttgtaataattaatgatgctggaagtaccagcttgcaagactctttcagtaacctctggaagccacctgtttatacctctctgattattactatattgttaaaagcctggatggacacggagtcagtgaatgagttttcagtgtccaagtgtagatctgggacttgaagacagaatttacaaattatggtatctgtggcaagatagcggttgggatagacttgggagaagaaattctttaaaggaaaaattgaatttgttgcaaaagaagtttgtcactgaaacacgttttaattgctcatcgtaaatcagagtgtaaaagaaaaaaaaatggaatactccacttgttttgctacctagggaagactaataccttgcatagtcatccgttcttttttccatgtttgtctacatagtcctttttttttttttggaagatacatggatgtactctccatgctgattttattttattattaaaatgtttttatgccagtatgtaaggatcataccccatcccaaccccgacagggtttcactctgttacccaggatggagtgtggtgccacagtcatggctcactgcagcctcatcttccctagcctcaagcaatcctcctatcttagcttcctgagtagctgggtctacaggtgtgtcccaccatgcccagctaattttgtgtgtgtgtgtgtgtgtgtgtgtgtgtgtgtgtgtgtatgtgtgttttgtagagatgggatttaaccatgttgctcaggctggtctcgaactcctgggctcaagcgatctgcctgcttcagcctctcaatcatccatgtttttttttttttttttaatttctataggtgtttttgggaacaggtggtgtttggttacattaataagttctttagtggtgatttctgaaatcttggtggatttttaaatggttgtatcgtacttattcaatcagtggaaatcgtttattgaaccagtctccattgggcaataagatttccattcattcactatcctaataactttatgatgagcatttttcatagctaagtctggtacatgggtatggtagtttgcttaaattcctagaatgctgggtgtgtcctgcagaccctggctacggatgaaatgagtactcagacacaggtatgcagtgtaagagcagctagttgactgcctggctctagtggccagagcagccccaagaagctggagctgcttggttttattcagtgccggcacaatgctgaaaacatggagcaaacacaacctgtaggtaattaacatttattgcccccctttcagagaacctcatgcgagaggatgatcaaagatcagttcctggtcagcataagtaaacaagcctctttaagataaattcccctacactcccttgtacctactccttggcctctgcctcagggttatagaacagctgccttcagctcttctcccctggggctctgcagaaccttccgacctttcagaaggtttaggtcctttccctgtagtttttcccaccactctgactgattccccacactagaagtagctgtggagttaaaggtgtacacattttaaattaatatacattgccaaattgtcttccagaaagtttacatttttaccaatagtgtaggtgagtgtttgaagaaactgaaatcttaatgttctaggcaaaatagtgccataggtggaagaaaacaaaggcttctacctatactaaattcagtacccatgttgattctaccccaaatataaatttcataagaattttctcccttcctttcgtctgctgttagttcagacccactctgagagcacccaaagtggccctctttccctcctgacggggtattcatttttcagggtctggctgaaatctgctttcttcaaccaaccagttagtagtagtaattccttcttttgagttcttgtggcatcattgcttttcacatcagtattgcctgtgtttgaatctgcctttattagtaacttacaagtgtctgtcttcctatctgtatcgcagactttttagggacagggacttggtgttccatttccctgcggctacccttttggagatgggcttcctagcgagcagcttggacatacttgtcttgaggaagacactttgagaagaatgtttccagataaatgttaagttgaaccaaaatggcaatttcctaagtttcagcttacatttctgatacccgcagaatttggtctgcccataagagatcattcactttgccctttcactccacatgcaggtgtcaggatgtatgtatctcctgtgtatgtatgtatctccttaaatgacttgtgccatttaagttattttaaaatggcttccccataaagatgcgtgatgttttcccgcatgtaactgtttctcagaaagatgattatataaataccatattcacgagtgctttttagttaatatattaacttaagcaattcttaagattctacactatagcctgacaattaaatgaccacttgaaaagcctgacctgtgaatctgcagtatttttttcaacattattttaaaaattttaaaatttggggtatttttgtttttgcagagcacacagcattggtttattcaaagagtttttctctgcattacactattattttcttactacactttatgtacagttagacccttgaacagtgtaggggtatgcataattgaaaatctgtgtgtaaactttggactccccagaaactttaccaatagcctactgttgacctggaagccttaccaatgttattttgtatgttatgtgtattatatactgtattacaataaagtaagctagagaaaaagcaagtttttttttccaaaatgttgtgactcttcaaaaatttttccaatatatttattgaataaaattcgcttgtaagtggacctacacagtttcaacctgtattgctccagggtcactgtattttggttcctgtctcttctttcccctcccatttacctactgttttaaagcctgttaagtctttattcattagttactccacatttctttctttctttctttttttttttttttttgagacagagtctcagctcactacaacctccttctggctcaagtaatttttgagcctcagccacccgagtagttgggactacaggcatacaccaccacgcctggctaatttttatattttcagtagagatggggtttcgccatgttggccaggctggtctcaaactcctggcctcaagtgatctgcccgccttggcatcccaaagtgctgggattacaggaaagaaccactgtgcccagcctactccatgtttcttaaaaatggcctatataatatgattcataagcaaaggagtacagcatttaaattttaataagtgttttctatctttgacctttacaaagcctataaaggttacttttctagtcacttcaagttataacttcaggttcaggcctgtagaggtaagtaatcacatttgaacatgtacttaggcatctttatgtttcttagtgttctagacttgtccttattgaattttattctaatttaaaaagtagtttctgtgttcgataatttttattccttaattacctagaggactgaaactcctgattcaataaattgttgggcaaaagaggttctctacaatgaagaatatttgatcaaacagttcctgtggaatcaatttcatagttgggctttgcttatgtcattaggcaaggctggcacttcacatatttttatgtagatggttctcccaaggtctgctagaacttcagccactttccatgacacccatttgactgttgaaaagttagggctcacagattttcagattgctgtgagaatgtcaatgcagaattcacagggacagcctttctatttgaaaatttaaattgcaaggaaattttttaaaggaagtaagatttggaattaagattcagcaaagaatgggaaagacttttacatgtacattttcacaggttttgacagttctgtgtcttggctctaccttccctgagtcctgcctgctcttgagtgttgtataactctttgtaacgtgaggcgggcagggtgtaggtagatgctgcatgctgttgaatgttgtggattctatgtgtgctttattttctggggaactagggtgtggtagtgctagctgggtatattggaggccactggcttaaaactgtctttcccatagagtctaatttctaagataattttgttgacaagtttctcttctgggatgaaaatatgtttaattaggttaaacgttggtcattgactagtggtggtggttatgatacttccatgaattcttagcttcagtaaccttcctgagtggggattttatttgggggacaaggagagattcctttcttcctttcattcttcccacctttttgctctcatcttttactacagcaacttttcccattagcatctctagaactgtggttttcaaaatatggtttgaggactcttgggctttacgggggacccttttagaagatcattgtgaaaacagtagtgagtagaacagctggtacgttagcatgaatctagtcagcagcattaacttttcctagcagtacgtgtattcttcattgctatgcagttgcagttttcaaaactggcttcactgcagaatgtccttcagaatgatgagtggtaccagagtagtatttagtcttggtaggggctttaagaagttgttgagttcaacctcccacccatgcagatattaatccaacagccatcctgtatctatttatgtacttcaagtgatgggaaggtcactacttcacaaggcagcccactgcattttcatacagctgtatatttttggaaatatgttcttgtttacaaaatacagcttgatttctctaatttttaccctttgattctagtccactcttggaatccaatcaaaataaaacaaatctaccttttgcataatagccctgcaaatatttgaagttagctcttgggttttccctaagtcttttgtaggctaaacattagttttggtaattaatataaaaaattagctttaatttcttctaggattaattaccttttttataagtattatactatttcgttaaatttttggatagtactttatcttacctaatcagcaaataattataatgtaattttaacatttatatttatatgtgtattggaatttgatatttgaaatgtataaaatatttaattaatttcacttctagatgaattgtaggtatttttgaaatacagtattggtgtgaacagcattttggtactgcgtgaagtaaatgggaaaacattagtattgtaattttgcctcagtgttacagttaccaccttgatagtgagctttgttgtatatgaaaagtggcttcaagttatgttagagatagaaggaaacttagagttccttgaggaaagataggagtaagtaagcaagagaccctcttaaaggaggtacaattagcacagctatttctagcacctgttcgatgagtgtggcccattttagacgttgggaatacagtcatgtacaagatagacaaaggtccttgctcctctgtagcttacattctggttagtgaaagaatatttttagattgctgtagtgctgttagaagtaaaaaaagaatgacatcaggagaactgggggatggaggtgcattttggtgatgaagatatcagaattggggggcataaaaagactttcatcaaactttgttgtgcctccagcagatgttgagaattgcagtatgaatgttgtttattcatgtgaagcttgtagcaacaggaaaatcgagaactactaatttagcagatgaggaaactgaggtacaagtttaaaattgataaattttaataacatattcaggtttgtataactcattagtgaatgagctaggactagaatcatagtcctagtttttctagtttccattcccattcattcattcctttctttctgtatttttttttcaaatgaatgttttcagccctcagtctgtgccttgccaaagtgtgtttcattgatgcatttggtaggtagaaggaaagagttgaaggagttgctttcagatggggtgagagaagcctctcagaagcctgcacaacttctcttagaatagttggaattgagtggttcagagactttataaatgagaattatggcagcaagatcatttgtttcctgtaaactatatgcttttgtaagttgaacattgtgctggattgagcagaactttttcccctctaagcgtaagaattttattttaatagatctataggtttcaccaaatgaggaacattgaagttggcaacctgggttgataaagacattattaggagcttggcagatggaatagtggattagtggaatcagttctgagccctgcagtgagttgaacagctcaactgatggtattcgttagatggtacccgatgtgtctacctgatgacacatccagtgaggaatacaccctctatacgtcagtcagtggcccaggctcatggttttatttgtggtgcattttagggtacatggattaaggacctgccagcttccctcagcccatcacaatatagaaccaggggttggccagatagtaaatagtttaggctctggggccatgtggtctcttgtaattacagatctacctttagcacagaagtagccatagacactatgcagatgtgtgagttggctgtgttccagttcaactttatttgcaaatacaggtagcaagccagatttggcccaagagccctggtttgccaaccctgctttatggtgaggtaaggtctatggggcgttatttttgctcctccttccacctttcgttttatacttctgggtgttttgaaattaaagtgagatgaatgtggccattccagtagtctacagtttgaccttgacatactgaagtcaaacaatttttttttttatattttcctaagttacattcttgttaggtagcctttcccctttttgagacagatgtaagaagaaaatgttttttactttataagctcttacttcagaagagggtaatgagttttatactgtaaacacttcagttggaacttaaaagatattgagatatattcctttttaatcaggcaaaactggaattgaaatttatttgggtagctaatcagaaaactaatcaatcaaatgtttttttcctttttttttttgagtgcaaagctgagacccgactctttatttggatgggctgttcctttaccttatcatacgttaattgatgtaatgccaggtcaagaaacagcattttcagttaaatgaaatactgtgctgctgttaataatgagtcctctgcagatgtatggcgatgtctttgtgaactataatgaaatgtgagaagaatgtagtcttcatatgattagaactgtctaggaatgtgtttgatacaatcataaggataaattgccttagactttttacctactgttaatgggaagagattttggcctgaatttttattgtcttcaggaaatttctgttttatcttaaggttggttaaatatataaacaacgattcagtaggaatttttaaaatccctaatggacttcaatatgaaaagaaagtaaagaatgtttttttctaagccttaagccaatacttagcacatttcataccattttagcagcacttgtcagaaagaaaattttaaaaatatagtggattttgtttggttgccagaatgcacacttaaacttgttctgcaattttctcttcatttgatccccaaatgaacctctggaaggtagcctattcttaagtttcctcctgcactttaaaatcaccctgcttgcacctcttcacgtaggtctttgaggagatgtgcaccttgtctttgccaaggtgtgcctctggcttcctccccgatggtttccacagctttccttctccttgcagcaggcgtttccacttaatagctgccctgtcagcatctctctagagatcccatcccaaatctgtaaaccttcttggctttttttttttatgaagataaaatatgtaacaataagacactagaccatatagtagttatccagtaaatcatagctgtcatcgttgttgctattttagaaatcctacattttatcgtcttgcatggtccgctcctttttgactaccaacttgcccatgtgttttctcctaaaacacgttgctcaagttgcttgtccctggagccctggcattttctcctcctcaccattgttctcatacctctaccatgggaaccttggcagcctgctttctggccccatcttgccaaatgcccatgtagctaccacaccgcggctttttcttgatctctgtcctctaccccattgtcattctggacaaggcagtctcccgattttccttgtcctatttgatgatacgttttatatttgcttctctgactttgagtcctcttgttagcccctaaatgtttgtactccccaaggttctgctggtgatctcctttcctctccccctccaccctttctattgatctcacctccttctcaggcttcagagagccgtctgtgcaggtgactatgaaatgtgtatttctcatccacctgctttgagcttaagatttacatctggagaggtcaacctaggggagccatggcatctgagactcagcgtgtcttaaaccagattcatctcttactgtcctcaccagcttctccagctctccttttagctgtagtgacagttgcactctctcagccaccagattgtggtgcccttcttcgccacatcttgccttcattctccacattgcattcgttgcagttttcaggcttatccttataaagtatcttttcttccaaaaattgcttgtgtatacatatgcatagagagatatctggaaagaaattcaccagaaagtttaattcaccatccagtctatctctgggtaatgggattctatattgttcaagcttttttttttttttttttaaataacaggccttgattactcatggacttgtgcccagtgtatacccgtctatctcctcagcactcccttgccctgaaccccatcactggggctcagttgctggttcattcattctttgtacctccggtcatcattttccgggtgcctttcaagtaaactttccttagtgaaacccttcttccagctgaatgtttcttcctttcgtgagccctctggtctctatgctatttcctgtattctgccctctgctctccatacatgtgtattttgtgttctgtcctttattagattgtaagctccatgagggcagagtttgggtctgattacccatcctttcccccttttggttacagtctcccagtttttctttgggagacaacaccttttccccctggctacagttttggtgggatgggcagttcaggtgtcctgccaacgagatactcttctcctggaatttgaattttgagtcatgggatacaaggactgacagtgattggcactgattcagcctggccgaggtgctctgaagaagccactcattagttcctgcctcccagatccctggagctgccctggtccctgaactctccgaagcctggttcttcagatattcctcgtatctgtgagctatctcatatccttacaataaattctctctctcttttattttaagttaaccaaaaccagcttctgttgcttttacccagcgattcctaccagtagagctgttatgattggaactgagcagacttaatcattctagctcttatattaattctgatgcttttttttcttttctttaaaaacacaaacaaaaacagccagagactgctgctactttgaaacgtacgatagaggccctgatggacagaggagcaatagtgagggacttggaaaacctgggtgaacgagcgcttccttataggatctctgcccacagtcagcagcacaacagaggcgggtaagtttcttcatgaagtcttgaaagacgtttttgataggctcagtaaagagtactgttcaattactattagaagttcttaaaatttcacattgagacccctgttgcgcctaggtgtcctttgggtacacactctggcagtcttgtgttgcagatgggatgtgatatgctggcccttcgtggactatgatctgagttcaaaactaggccatcctaggagcaaagggcttaccaagtctagcttgtggaaccttttcctgtcaaccttagcactgttttccctgacatttctttaacttttgcctttaaaataccttagtgaacagtgctgtccacaaacatagtgtatcagttttaaacatatgcgttgcaaataacagaacatgctgcttttgactgatgtatgtaacctaagcctaatcaacaaaagaaaaatggtaatacctactccaagtaatgatcacagtttggaattttgtctcctactgtgtacagcagcttcctcaaatacatgtcacagatttgattctgtagtaataactatctttgtagaagttcttggagaacaatttgtagaatagatttgaatcttctcatgttgtaggatttcctaggagtgggtgttagagaagatgggaatcaggttttagcgcggtaggaaaagtccaagagtagaagagtcagctctctctggcactcagcaactctgtggcctccccttctgtttctggcttctttgggcacagaactcaggttatgggtctcccatctgcattgccacaaggacccagcaagacagtctctgcagatgtgctctgcgacgagaatgctgcttgtagttatgtgagtcgagctgtcttgtgcaggtacagtacgtgtgatagggcctgagtggagtcgcgtctcacatcgaggctttcttactgcatttaaaccttctgccgtgctgcaaatttcatcttttgattgcttcaccttgttttgtgctagtgttcagcttcttgagaacacctctgaagagaatgcctgaggcgttgctaggcaacaggaaatgcacagtggctaggcttcttccacagtcataataacaatgagggatggagagcatgtgtgtctgtctgtctgtttcttttaaacttaatcacaaatgggtgtggttttaacagcgcagttatggatccttttgccttttttgttgaaagaggagcatataaaaactgtccgagagtcattagcgcagttcttggatggaaggcagtgaagaagtcagtttctccactcatgtagtacttccaggggtttctgcccttttttcaagtagaggatttgactttgttgagagttggcatgaccagcatcctaggatctgcactaacacgtagcctgagtaatgctgacgtcacttgtctgaggaccaggctcaagaactgctgtgttcactcagttcattttcagacctctgtgtgcagtggtgggggttgggggtgggtagccgtttctctttatgggtggaataaattcaggtcctggaggagcccactgggaccaagccagaactgctgagaacactagccctacttctgggttcccccctggcaaaggtgcatgtgcctcgctgaggaatatgttgcagtcacttagttcattgacttttaaagattttattgctggttcttttactttcagactcctcaacaaacagaagcagtgttctgtattacatatgtgtattatatatagacacagaaaggtagtgcccagctgcagtgggggaggttcatgctttaagcctattttctgggataaatcagtgtctggtatttatttgttaaaggtaatgttttttaaagtgtggtctctgaaacgctaattccgtagagatgctccatcaaaaaaggagaagtagggtgtgtgtgatcaattagatgtgggaagccttacatgatcgaattccttctagaggttcacagtgcacattggcacataaatgatgagaagcccttcagtaagatccgttcattaattcactgtatttgattatgctacattttatttctataatactcgtgaacattctccacagtgacttttgggaaatgaggatgtgagaggcaagtgtagtttgaagttacccgaataaagatttggaattgggcgataacgtttatgtgtctgcagtgtggagcttaaggttagtctgatattctcttggcttcaggcagtggccccataatcactaaccctaaccatggcagtaccaggtattttgttcatttggcaaattctttatgtgcattaatccatagccacagaaagtgttagaaacatgtaataagtggattatgtactgggagacttgcttttctgaagtggttgagaagaaacagtggttttattggttacacgtttagcattcaaagttttggctctttttgaacagccctagaggctatgacacgtatccgaaattacggcaaggcgctgatttgaaacctgacagtggtgtgcgagagccagcttttggctggctaatggagtgagcctagatgtttctgagagtccacattctatcatggtactgttggtatcgtgtgtttgttgcttttacgttttgtggggagaaatggtatgtcctagtggtgtccacaggtctcaggttgattctcacaattgtcgtggttcctggtctcaaggagttttcagtctaatcagagagttggctgcataatgctaacctaggcaccggctgagggagtgtgtgtgaaagtgcccagcacagcaggagtaaagctaagcctggggctgacgggtaggtatctctgttccaatgacttcactgtgtattgggcaattgcctctactgttctcccatgcccagccccctccgccccccaaatcaaccgccttatcacgtacatgcccagtaggctggaagaaaagagtaggtaagggagagcctgttgctttagggttatctgggaaatctgcccagaggaggaggagagtatactttggaaatgatacctgatgtttattattatatcaagactgtttccagtttatgccaaaaataaaaatatagtcattatatttcaaatattagtttggtcagactccactttagaaacaggttgtgttccagaaatttgcctgtaagtctgttgtttataactgagaacttattttcccagtggaacaacttgatggttaagttcccagactagtccacagagattttcttaattcataatctctgaaggtcagtagaactgggggagtcatgcgtgttcagctgaggaccattttaaacctgtttttgaaaatgcaattcagtgttccccttggcagcagaatggggcctggattgggccacccttatcagggattgggacaatatctcagccctctaacttgttaacactaaataaatcattggtgcatgacctggagctgggtggctcagaggcctgggagtcactcccagctctggatttgctggggtctctttcaggtccccgagattacctcccctttgtgtctgcacgtgctcaccctgacaccctcatctgctctgcgggacagacaaggtgttggtgtggaaaattcttactgtattcctgggcgtttggaaggggaagatgtcatttatgttagagggagcaatgacaggagaggctcatttagacccgtgctataaaggggcaggcatcttactgaatgatagtaacagtcaccctttgccagaaccacgtcactcactccagggctgcacggagcttatggttctcggttctctttccactagatggggctgagctgagactgagaggaaactatacaaaaagtgcggtcgtatttcagcgttgggcttgtgctgctttgtaaaaggatgcctctgctctgtttctaccgggtctgattttatggcagtgagattgggctggcttccaaatgcctgtgtataagaactcttaagtagaaggtgtttttcttgcctgttttgcccgttctttgcctgttctcatctgctttaaaatttggataggtgcttatagcagagatctgctggcctacatataagatgcccttctatttacgggtaagcagaatgataaaaataaccagctccatggtgaatcagtggaattttactgactcgcttcccaaatgtgtctgcagcttactccatgagcactggcaccctctctagaggagattgattctcctctgtagttttcccgttagctaacatttccatgttctcgtgcctttctgccagtgttctgaccccgttctcgtgtgtaggtactccacaccaggttttcagacagggctgctgtggccttggaggtttctttttagtggcagtgccccaagatttgtaaggattctgcagcaggtttagtgttagtggttttgaaaatgtatgagacccaacagatataaaaagaaatggggcttttccatgcagagggtacctcagtttgaaggtgaataattcactgcctcggtgaagcctgaatgcaacaaggtttaactgagacggtctaggaactggcatttagacagatctgtttcctatcttcaaaaaggctcaaggatgcttcagggctgcaaagccctcccatccccctcccccatccccccacccactgtgagccactgagtgcttcagtggaaatttccacttgtctgctagggagaaggggagggtgagagagagacaaagaatgtaactcaaattcaagcaagctctttttatggaaaacttgtaaatacagggttaagacaaaagtgaataaagaaaatacaacctttacatttaagggcactgtcagaaaatacagttttccccctggacaactaggggagtcggggaagggctggcagcaccgggcagtctgcatggtgactgaatggtggaggggctaggcctctccaggggaggggcagaagggacatgagagctgctggctctcttacaaccatgctgctgtgaatggagtgtttttggtggcattgttttccagtattggggcacagtctgtcttggggaagccatttctctgagtgttttcagatctctagagggtttgggccatgtagtagagagttttgtagcatgtgagtgtcttaagaaatataaaggagggcacattatcacctggaagatcacgtgggcaagttctacctaggaagaagttcactattgctccagctttcaaacactgttatctgcagtgagaaatgcattagtgtcctgaacctttcttggttacttcttgcctggcatcagtcatctcctcacttccacttctgcagagttagtgtgggtcaaagttacgtgcttttctatagaaaagagagatgcttttgtgaagctgatagcaacttcatagaagtggtgattctataattagcaccacacatgtaaaaacaaacctttaaaatgtaaacactgctcggctttgtgttcaaggcaatgttggtgcttgcatggaccctggctacctggtaggcggaaccatgtcacttgtgccatgtagcacatggtcgaaggtgctgggaatgtgtaacgtaattagattttagactgttttcccaaaatgagctgtgtacttattgattcaatcaccaagagtagaagtggaaaatggaaaactagctatttggagagcttttgttaagtaagaatgtcagctttggggcatgtctagtcagttgcaatgtagtcaaatccagacgtttgtgccttgagtgaggagttgatcgtgagtccacgtgcgttaggacttctggtcttgtgttttgattctgcctagtttggctggggaagaagcagacactgatagctcattgtggttgtggagtcctcttgattctctcttttcccagggtcaggaggaagttggggcagagggctctaactcccctggagacactgagccccttttctggtcaccttcccttgaacagcagctcctctgattgttagaatggtttctccatggcaaccttcatgaggatgcagggagcgggcatcaagggagttagttccaaggccattttttcagcctaactcccatttttgtaggtctcttgtggacctgtgctgtcatgagaaagggatcctcgcaggcatcaaaagccacccagccccaccaccccacacaggttgtttctaggcctgactttcttcatgtgtaaaaatagaaatgcgggactgtacttggtgttgtcatagctgtaaaaagtctcattctcagtccttaggtcatctgtagttagcaaagcccagcagtgagtcaggggtccttgcctgtcatggacagtctcccacaggactgcggtggaagcctgggtttctgctcatgcagcagctcgtacagcctctctgcccagctgggctgcatattccaggaggatgagaccatgtgtgcctcatccatttaacctcctgaggtttgtctgtagtagatgctcattaacaagttaagtttgcccagatgaataggtaagaagaaaaggatatgtactggaagcaaccaggaattggtgaaggtcattcctgtgtgggaaaaccataatggaccatttatctgtgtacttgggtcactgaagcaggcagagattgactttatcctggacttctggtcagttctcttgtggcctgggagagacatcttggttccctgggagaagaggtcgggagggggttggtaagaggttcaacttcggagagtggcgaatacagtaaggtctgcctgtctcggagtcacttctcaccttcgctgttttggtagcgttttctttctgtggaaacttccacggtgtaatagggagccatgggagtggaagcagtctttgcccacatcagccccgggcgcatagcagcaggacgacaagcatgagatgccagtcaccagctgtgcatgccggcttgtgctcgtttagttggttgctgaaggagcgttgtcatgcctggtggcaggaagtcagagcagttaggagggtgaaggcaagagaggggttttggtagcaacagggagcctcccgaagctaggaaagcccagtgttaggatttccaggtctttaactaggttttctctttatccttgagaatcctccaacatgtgggtactaggtagcaagagatacagtatacagagtggggagctgtggggtctggagtccggagcttgactctcactttgtgacctggggcctatcagttcccctctgggcttcagtttgctcatgtgaaaggtttaggctgcgttgtctttatggtcctttccagcacttccagtctatgattctgtaacccatttggtcccaaagctatctgtggtttcttgtgtcctggagtcaaaagacctgctctgtttgaatcctggcagtgaccacttcatagctgagtgaccttgggctaatgacttaacctttttgagtctctcttcttaactacattaaattgtacgactcaaaggaggcaacgtgtaggaaaccactttgaagactcctagaggagtattgttgctggggagagggctgctggaccccaaccaacactcggcaccactttctcttcttccctttcctcaattgccacacggagtggagctgccacttctctttcatcctcttcctcaaaagttgtctgaaagctgtgaaagtactttgaaaattagagtcttatgaaagacacttcttttttaagttcagaaatatgaggtttctgatatatctggcttcctgtttccatccttgggtattctttttacccttatcacatcatagaatccaaaagctttgggtgtatttcttaggattattgagtgagtgctgagtatatggagaacactttcaggagggctggatgagaattgattagtgggcagttgagttggttgttggcatctgtaaacacactttctcttagaacatgttgagactcctaggctagctcacaagcttctaaccctgtgaagcagttgaatggaaaatggaagaaagcagtgcttgctatgaacaatatcataagtaagaccaagacagccccagaggtgctatttgaataagttgaatacttgactgtaaggaagggcaggcttggacttcctgtggactctctggagggaggggcatggagcactcggcagtggtggtgtctgggttacttgatggccagagcatgtcatgctcttgctagagcctccctcctgatgcatggcatttcagcagcacattactctaagcacagggcttcaaatggaatgaagcaagagaggaaggcttctagggaaactggacaaggccaaggaagaggcgggagctcagagaaaaactacctgctatagacttcagtgtgttgggaatgttggcagacagggtgaggtcataacttgtccgtggtagattggaaggacattttgatgaatagtgagtgaaagagcaaatggataaatgggaaggaaaaaagcattgggcccctgttgggtgagagttccctgtactgcccaccaggtggccaaatggaattattgtggggcaaggggagtgactgggtaaaaggctgagggttgcaaggaggtggtgatttgaggttgatcacactattttaagctctgttccagagcctaactcaaagtaagtaatcaataattaaatcttgaataaatgagtaattcataagttgggtcattgcaaccctattacctgctatatggagtagaaataagcaagtggaattaaaccttggaaaatgtggccaggattatgtgtagttttcagagtgagcccaagtggcagtcttgtcagtgagcaaatgtgcaagtcactgcttcaagaagtttgtggaatagtggattcgtttgtaccgtttttatttcgttgcttaaggaaccctgggagtcttcatcagctgtaattgctccctgttgcctccatcccacatcagctcattgaccaagtcctgcccattcagcttctaaactgccattttaaaatcatcagctttatagcgatgattagcatgtaataaactgcatatatttaaagtgtataatttaataaggtttgacatatgtatacactcacagaatcaccacggtcaagataataaacatatttgtcacccctaaaatttcctcctcctccttcgattccttcctctacttgtccttcatcccaagcaaccactgatcttttttctttcactgtcgatttttttcgactttatgatggtgcagaagtgattgcagatgcagtagaagccgtactcaaatacccaaacaaccagtctgtttttcactctcagtaaagtattccgtaaaattacatgagctattcaacacttaatgtaaaatagggtttgtgttagatgattttacacaactgtaggctaagcgttctgggcatttggctaagtgatgttaggttaggtggtgtattaaatgcgttttcaacataaaatattttcaatttacgggtttatcgaaatgcgtatattgtaagttgaggaacatctttttttttagacttacatagaattggatggtattggaccccttttactctagtttctttcactcagcataattattttgagatcaatagtgtgtatcaatagttcactccttttcattgctgagtagtatggcattgtatgtagtgaatatttgtttttttccagtttggggttgttataggtacagctgctgtgaacatttgtgtacaagttgttgtgtggacacatgctttaatttctttggggtaaatacctagcagtggaatggctagatcataactgtaggtgtatgtttaggaaagtgccaaactataccagcaatgtatatgagagccggttttttttttttttttttttttttttgtggtggcgtggggttaccccaaagggcagactggtttattgggcatcagctgggaaaatcagcggttggacttggccacacatgccagctcatccttcttcttgatggcaaaggagttggaggagcccttggtggcagtgatgagctcatctgccaggcactcagcaatggtcatgatctcccggagggcaccctcaagagtgcctgtgcacagcaaccaggtggtctgattcacatggtgcagtggggacacgtccacagcctgtcatctcacagtccctgctcacccaaagcctgtggagtcctcctggggaccaccattgatgatggtgttcaccaggacctggaggtgagggttctcgcctgtgagcaggtggatgaaatggaaggcatacttgatgatgcgcacagtcatgagcttcttgctgttgttgtggccatgcattatcatggagttagtgagggactccacaatggggcactgagctttgcagaagcgtttggcagcataaggccctgcattgtgaggcaggtacttggcatacttctccttcactgcaatggaatcctgcagggaaatgtcactgatctgcatatcatcatttgtgctgcatcattgatctgcacagcgtccacttcccaaagagcttggtgtcaggggtctctaccactgctggtgctgtctcccactcggtcatccagagggcacagcccgagtgtctctgttacttggcgtggacctcgtgccaccctggagtgccagtttttcttttcttttttctttttttttttgagacggagtcttgctctgccacccaggctggagtgcaatggcacgatctctgctcactgcaacctccgcctcccaggttccagcaattcccctgcttcagcctcccaagtagctgggattacaggcacgtgccaccatgcctggctaatttttgtatttttggtagaggtagggtttcaccatgttggtcaggatggtctcgaactcctgacttcaggtgatctgcctgcttcggcctcccaaagtgctgggattacaggcgtgagccaccacatccatggaatgctagtttttcttacatccctgccaacacttggtgtggtcagcctttttaattttatggcactttagtaggtatctctttgtggttttaatttgcatttctctcatgactaatggctttaggcatcttttcatgtgctgctttgccatcgtatgtcttctgtgaaatgtctgttcaaatcttatgaccattgtttaaaagtttttttaaattaagttttgagagttatttgtattctagatacaagtcctttatcagacttctaattcgcaaatcttagtggctttttattcaaagagcagtttttaattttgatgaaatctaatttatcaattttttctattatggattttggttttggtgttgtgtctaaggaaactttgcttaatccaaatttacaaaagcttctaagttttatagctttatattttacatttaaatctgtcccattttgagttaattttttaaatggtacaagtagggaagaaagttcggtttttttgcgtgtggatactggattattttagcaccatttgttgtaaatctctatttttgtactccattctagtcttttgatctctctgtgtatctgtacatgaatatcatactgtcttgatggccatagctttataataagtcttgaaatcaggtggtgttagtccttcaacttacattctctatcagagttgttttggctgttttagatccattatgaactttctaatcaatattctagggttttgattgaggttctactgaatgtcaatagattttatttcagtaaaataaataatagatctcaatttttgtttaacttggagagggttgacatctaaattttgagtcttcttacccgtgaacaagatatacctgatagattttgtttctttcagcagcgttttgtagttttgcataccttttgtctgatttctctgcaagtattgaatgtttaattcaaggtctgattatttgttactagtatatagaaataacattgatttttgtatcttgcaatcctgctaaactcattagttctattttttttatagatttcttaatactttctcaaaacacaatcatgtcatatgcaaataagacagtctcactttttgcttatcagtctaggtacctattctttttcttgccttactgcactggctagaacctccatttcagtgttgaatagaagtgacagtggactttctggtttgttcccagtcttaggggaagaacatttagatattcaccagctggtgaaatgtcagctgtagatttttcaaagatgctctttataagtttgagggaggtcacttctatccctagtttgctgagatttttttttttttaatcaggaatggctatggattttgttaaatgctttcatttgtgtttgttgaaatgatcatatggtgtttcttttttagtttgttaatatgttttaatttgaattacattttttttcaaatgttaagccaatcttgcattcttgggataaagcctgcttggtcatggtatattgtattttttaatatatgatagtagtgaatttgctaaaattttgtttagaattttaaagtgtgtattcttgagggacattcatctgatttcttgtaatgtctttggtttgggtatagggtaatgctggcttcacagaacaaattgagatgtgtcttccttttttctcggtgaatttgtatcagaattggtatttttgtcagatgagtaggttgcgaaaattttctcccattttgtaggttgcctgttcactctgatggtagtttcttttgctgtgcagaagctctttagtttaattagatcccattggtcaattttggcttttgttgccattgcttttggtgttttagatgtgaagtccttgcccatgcctgtgtcctgaatggtaatgcctaggttttcttctagggtttttatggttttaggtctaacatttaagtctttaatccatcttgaattaatttttgaactactcatctaacaaagggctaatatccagaatctacaatgaactcaaacaaatttacaagaaaaaaacaaccccatcaaaaagtgggcaaaggacatgaacagacacttctcaaaagaagacatttatgcagccaaaaaacacatgaaaaaatgctcaccatcactggccatcagagaaatgcaaatcaaaaccacaatgacataccatctcacaccagttagaatggcaatcattaaaaagtcaggaaacaacaggtgctggagaggatgtggaggaataggaacacttttacactgttggttggactgtaaactagttcaaccattgtggaagtcagtgtggcgattcctcagggatctagaactggaaataccatttgacccagccatcccattactgggtatatacccaaaggactataaatcatgctgctataaagacacatgcatacatatgtttattgcggcactattcacaatagcaaagacttggaaccaacccaaatgtccaacaatgatagactggattaagaaaatgtggcacatatacaccatggaatactatgcagccataaaaatgatgagttcatgtcctttgtagggacacggatgaaattggaaatcatcattctcagtaaactgttgcaaggacaaaaaaccaaacaccgcatgttctcactcataggtgggaattgaacattgagaacacatggacactggaaggggaacatcacactctggggactgttgtggggtggggggaggggggagggatagcattaggagatattcctaatgctaaatgacgagttaatgggtacagcacaccagcatggcacatgtatacatatgtaactaacctgcacattgtgcacatgtaccctaaaacttaaagtataataaaaaaaaattggtatttttgccttaaatgtttggtgtaattcaccagtgaagtcatttgggcctgtaatattctttgtgggaagcttttaaacttctttaataagatatagggcttaagggtttaaactacacatatttcgttaataagatatagggccattcaagttatctgtacttcttgagtgaggtttggtagtctgtgtttttcaaggaatttgatcatttcatctgagttgttaaatttaatgcttttttttgagacagagtctcgctctgtcacccaggctggaatgcagtgatacaatcacggctcactgcagcgtggacctcctgggttcaagtcatcctcacacttcagcctccccagtagctgggactacaggcacacaccaccatgcctggctaatttttgtagtttttgtggagatgaggcttcaccatgttgcccaggcttttctcagactcctggtgtcaactgatctgcctgtctaggcctcccaaagtgctggtattacaggtgtgagccccagcgcctgaccttgcaaaaattttttataatatttcctattattttaatatttatgaaatctgtagttgtttcacctttctcattcccagtgcctttaatttataccttacctctttttactcaacagtctggctatagaggcccttacctctttttactcaacagtctggctatagaggcatatcaattttacgaatcttctccatgaactagtgtttggtttcattgatgttctctgtttttcttttttctgctttggggatttctcctctctctctctcttctcatcttactggatttaatttgctcttttcctagtttcttaaagtagaagctgagactattgattcgaggcctttttttttttcttacctaggtgttcagtagatatgaatttcctgacaagtattgctttcatggcatcccccaaattttgatttgtagcattttctttttcattcaattcaaagtactttgtaattgcccttttgatttctccttctacctgtttgtccagcttatttagatatctgtttagtttccaagtgttgaggcatttttcgaagatttttgtgtataacttgaatccctttatgttatatggcccagaatatggttggcctcggtaaatgttctgtgtacacttaggaagaatgtctgtcttgtgattgttgggtaaagggttctataaatgtcagttaactccacttggttaatgttggtgttcactttttctatatccttggtgattttctgtataagtagttctatcgattactgaaagaggaatgttaaaagacttcagctgtgattctggatgtgtccatttctctgttcagttctgctgttcttatatgttgaagctcggttatctggtgcatgtatatttaagattgttacatcttggtggacccattattatgtattgtctctttttattcctggtaattttctttgctctgaagtctgctttgtctgatattactgtagccacttgagcttgcttttgattagtgtttttggttggtatatatttttctgtccttttatttaattatatgtttacttgaataattattccactaggcttggctttaagagtaaatggtcacttggtaaatttacttacaagttttgaacctctttgccctttgtctggaattacacaaaatgccatcccttttctcataagttccttccttgctgaatttgttccttttcaacttgatcttcccagcttcctgtgagagctccacatttcatgctaacaccatcacggtcaaagatttactctggacctgctccgtgttcgtctctattcggagtgctagggttaacaccagagcctttcttcctatggcaactgtgctttagtggagtgaggcagacagtaagcaaatgcatactgtgccagtggtgagaacgtactttgtggaacaaaacaaagccttgagtgagggcaatggagagtgaggggccttggtggagctaggagggtgctgctttaggagagtgggcacagaaggtctctctgagagggtgacatttggacagagacatgatagaagcaagagatgagctatgtggaagttgggcggagaacatttccaacagaaggaccagcgagtacaaaggcctgggaggggaatgtgcttgggagtcctgagaaccacatgtatgcctagaacaaggcaagcgatgacgaaaatttcatagttttaaccagctagaacattgcaggattttgaaatactgccctgaaaactgacctttagtcacataatggtccaaatcagacagtacaagggaggcttaaccttttaggtctgagaggagccaggagtgggtagggatgggctctttccttgcactgtcagccagcaggctgctgaggaccttgtcaatctttgaagaccagtgagccgtgcgggatgcccgtcgacattagtctggtttgagtgatgagtggtaaattctttttcttacttaaggttccagtaattttctttttgttccttgtccgtattgaacatagttgtagaccagtcccatgcctttcttaatcttttcccatgtttgtgggctcatggttctcttaggtgtgttagttcacagggaaaatcctttgaaaagttagaagagtatctaatagatgttttcacacacacacacaacattaatgaatagtttggaaaattcagtctcgtcaatggattagaagttttcccccatgctttctagtacttcacaccatctgtaatgtcacagtgtgtttttgctgccataaagctggtttggattcatattttcacaagagtgtaatgggaaagaccatagaaaaagggagattgggcttaacactgcaattctgtttagctggtcagctggtagtttctattttgacaaggttatgtgtgtgtatgtgtgtgtttgtgtgtagttgatgtctgtctaggaagagtaaaatggaaacactgaccaaaatagtagaattattacaattcaaatgcagacactcacaagtttttattttattgcaggtatttcttggtggatttttatgcacccaccgcagctgttgaaagcatggtggagcacttgtctcgagatatagatgtgattagagggaatattgtcaaacaccctctgacccaggaactaaaagaatgtgaagggattgtcccagtcccactcgcagaaaaattatattccacaaagaagaggaagaagtgagaagattcgccagattttagccttatatgtaattccttcacatttgggcagcatggacgagaaggaagaatttgcaagtttggcctttatataagcatgtgttgcaggtgctgtttgatttttctaaggtatttttagcccttgatcccctttgcttgcgagaggtggggaactgctcactgacagcttctctgtaacctgcagtaccagtggatcgttcttgattttgttttcattagtgtcatttctttgtcattgaggacttttccccttacaacagtaacaccattttttgaagagcaaaacttataatacctcctgggattgtgagctagtcattcagcctgtgtaaccatgtggaaataaaaattgacgaccaatgtattatatggacaacttttgctttgagtaataaacttgattgtaggaatgtgggaggtgttttgtccctttacttacccagtgcagtgcacttccagggccccgcagctccagtctagctggcagtgcctggcagtgtcggggaggcattacccagtacccactgaggtccagagccggggtggggcaggggaggaggggtgtctgtctgttccttactgggcacgccacaaaatcagtgacttttccctgcacacctcacttgtcattgtggtttgtgctgctctttgtggtgggacgtgtgttctggtgcagttaaggtctcatgctgctccctgtcattcctttgctactagcacctgcctcctccactgtccctcatcccagggcaggcctcttgtaggaagtagcctcctggcagtggcatggcttccaggatgggtgaggatgaggtcgtttcccaaaacagtcacctgcatctcttcctcggtctcctcggggctgattggaaagacttgactagcccttcccccttcccagggggtgccctgcacaaggtgtctgtcaccatcacagatgacggaacttctgcacataaaatgttgggggaagtgccggttctgggaatctctgaaaagcaggaaggagccgagagttctggcctctgctttgtttttaaccatggcaagaccggaggatggagagatgtgcaagagatgcccaaagcgccaggagggcctggtctcccagctctggcccagcgcctcctccctctgtagcagctgcctgtgtctgcactgggtcatcagtgttgtcgccttgcttattaagaactcaggcggtatccagcttaacttcctccagaggcaaaaagctataaaaagtctctctgaagagcaataattcagtgaagaggctcattaagaactgtagactggaaataaaaggggtaaagattatctgggaaaatatgctacttcctgttttattcggaatttcctgaaagcgcaggctctcggtcagggctcgcgagagcaccaactctctagcagacactttgtgtcctgatgttctttgactcggtgcgatctgaggtccattttgcttggagtttattaaacgcacgccatgtgccatgctgcacacttatgtccattccctcagttactcctttcagcagccccaggaaaggcagcattgctatacctgttgcttggactaggaaacccccactcagatttgcccttgaccccacaactgccagtgatagctggaatcttgaactagggaccctgatgccatctgttttttccttcttgtaacagtaaggttgtctttgccctctcaggttaaacaaggcacttgggtgtctggagtgaattgtcaccactcagttagtggcatttggccgcatggcccgagtgtagcactggcactttcttttcctgcacttgccggtccctgacaagacgccattgggtattccaggtcatgcaatcctgtggcacaatttagagagcattaggaaggaggctggcaaagtagggcagccgtgcagtatgccagttcccctccttggaagctccaaaacgaagccactgtctttcccctgtgagtggttggtgcatagctggatcctcagcaactgaggggtcctcatcccctggcagctgctggcccgtcgggatgtctagtgttggagcagggcgtgcaggtgggtggtttccaggccacttatttgtcagagtagagcatccggtctccctgcccaggctggtggtggtccgaggctctggtctcctccttcaggggatgataatggcaaagtgctggcagtagagccatagacaaagacaggccctggcctcgtggagctgagaattggcatggaggcagacaaagtatgtacagtgtaggagctgctggggggagtacagaggatggagtggggagggcacgtgcaagctgagctctgaagggcgaggagccagtcgtgtgatgtcacaaggaactgaggggccagatctgggagactggagacctgtgaggagttaagcgcaaagggataggaggttgccaatgggaaatgacgcatggaaggcagaaggctggcatcgggtgaggcatcagcttcaggatgctccctggggggctcatgtccttggaaagggcatcttcctgggatttgcagccttgactattcgtgggcctctttggacaggctcagtcttccagaagtacttggtttgatctcgccaatactcggcttgactggctgcattttaggatacgaaacttggacttctgaaaggaatttaagaggaacatcggcatttaagatatggtgctcaggattgatgacataggtgatatttatcctcatgatcctgtcagcactcagagtcacccctttcctcttccagcatgtctggaagggcttatttttgccagtgggccctgccccctggctggaggaaagtatgctggctccagtctacgagagtggaggtcctgagagtctgcagtcccaagtccaaagtagtggccacagttcaggcctgtgacaagccagggggttgttttttgaaggtggcccagggaggttgaaaatgagagcctgggggcccaagaagctagtctaccgagctggtcttgataggggagaccctaacccagtggcgctagaggaattaaagacacacacacagaaatatagaggtgtgaagtgggaaatcaggggtctcacagcctccagagctgagagccccgaacagagatttacccacgtatttattaacagcaaggcagtcattagcattgtttctatagatattaaattaactaaaattaactaactaaattaactaaaagtttctatagatattaaattaactaaaagtatcccttatgggaaacgaagggatgggccgaattaagggaatagtttgggttagttaactgcagcaggagcatgtccttaaggcacagatcgctcatgctattgtttgtggcttaagaatgcctttaagcagtttccccgccctgggcaggccaggtgttcctttccctcattcctgtaaacccacaactttccagcttgggcattagggccattatgaacatgttacagtgctgcagatattttgtttatggccagttttggggccagtttatggccagattttggggggggcctgctcccaacagaagctgctccatgacattcacaatggtggatccattcacatggattgttcatgaagcatctgaagggagacaggcgctgtaccatggagtgtcaacaaaggaccatggagcccagtagatttttgctgaaagaccaaatgtatgttgattgagatgaagtattcggttaaaagattagagagtacggaaaacatgagccgcttttccaagcttttagttgagtctggaagagccctggtgtacccccacccacttgagggatcccacagtgctttcagcaggagttcaatgtgggtattcctttaccctcccgacagccccctaagccaaatattcttttgttttatgacttaagacacctgaggcttacaggataatagataacatccccaaggccgcaaaaggaggaggagttggagttgggagtcatgtctctctttccagagcccattttggcctgcttacaggctcctggaggtagatgttgccaatccctgcagtcctgattatgccacgaggggctggctctggatgacctgctcctctgggcccttccgacgctgcacctagagccagaccccaggcttcctcgctgccagagaaggggagcgctgggagctggggatccttgggagggttttattttttattttatttatttatttattttttctgaggcggtgtctcgctctgtcgcccaggctggagtgcagtggcgccatctcggctcactgcaagctccaccttccgggttcatgccattctcctgcctcagcctcctgagtagctgggactataggtgcccgccaccacgcccagctaattttttgtatttttagtagagatgggtttcaccgtgttagccaggatggtctcgatcttctgacctcgtgatccgcccgcctcggcctcccaaagtgctgggattacaggtgtgagccactgtgcctgggagtgttttaaatctcaggtcttcaaacagaaatcctgagaacatcagaaaatgttggtgtctcctggagaccaggtatttttttctcatgattctccctgctctgtaattcccactgctcatttctctccacattgctccacgggtgtcttttgagagtacacatatggcaggtgctgctctgggcaggatacaaagatcagaggggcagtgttctggcctcagggctctcacacgtgggggttggactgttcagctgtctaaaacacagcccataataaatataataacaaatgtttaaaccaagtgctaggaaactggggcggggacgggggagaactagattgactagtgcctggaatgagagtggggccaggtggggaggtggtgagactgcatggtgagctttgggaacccctgggaggggggcaagttacagtgtgatggtgagaaggatggtggaaatgtcagagttgcagggcttgtggctggaggtaagattgggaagtcaggttgctcagggtttcttgaaagatctttacaaagagccaagaatgagtcttgtgcatgttaacttgctataaaacatgcctcctaattgagtaaccccatgctgcctgcatatttgtgaggaaggaaataattccactgattggccatggagaagtacaaagagggctgaggcaaggggtgcagatgtctacaagaaggtgggcagtgtggactagagagggcgagtgctcgccaggcaaccccttcctgaacagtgtgtgctttgaaatgtgcgtaggagcgtgtgaaaagtacaaattattctctctctgctgtggtctgggctactgccatttgcgttaggaggtctccgcagagagatgacggcacctgtaatggccttgtgatgctacctgccagtccctggcctgttttctgcacctggaaacagacaagtatggtgttgatggtgggaagtttccaaggcgatttgtgggattcttggtcaccttgaaaaaatgcagtagtggaatgatcataggactttgggttggagaactgctcagagaactctccacccaccagccttgaccatgttcagtttcttctcccggtctaagtgtcctcacatggaaaatgtggccagtgaagcagatggtctcaaagagcctgtcctggtctctaataccctggaccgagttactgcctggtttgctgaagagttattccatcagtgattaaagaacttggtagttggtaggatatggaggtggggaagggttaaaataatttcttagaggcttattctttgcacacttcttttcatgttctgataagcatagctgttgttttcataacctgccattggattctgtggggctgactagtaatctcattctaaacagaataggcctgtctttaatcacaagaaaacagcaaaggagtcccagaggtcagcacagtcatttgctgggctcagattgccagcattctttttgttctctgaaaatgaagctttaagggacatggcttacagccaaatacaggcaagacacattctgttagtcgcaggaggaaaaccatgtcgaaacgaaaagtccatattggtggtagttttttgagagctacaccacaacccccaaaattgacctctaaagtgacaacagtaagacctggataatcctgcacattcctagtgccaccacaacccagtgagattaacaaaagactcatggaaccaaacttcatccccaaagtattcaggtccgctgggctgctgaaggggagcagcactggtgtctgggtgtggcatctgaacctttgcttccagaacaccagcatcgtcacatttctcagagaaagcaatttgccttgagacagttccattgtgagtggaagagacaagggtgcattgttcaccagacaatgcctgaagtaaggattatgcaaaatggactcttgacctctctattccaaataagtgggagactctgtagtttccataaagcttgtattgagctaaatgatgtgacttggatgtagcatcctttgtctaatcggataccaaaatgttaagcacctatttgtgaaagactggatattacactttgacagaggtgtcaggctctgttaattggtatcgtggatgctcattattggcagattccatatttgcgagtctgcttacttgctaaaatttatgtcctcaaaatgaatacccatgatacttttgtagtcattcaacgggtatgtgtagagtagcaaagaatttgagtcacttgacaagtctgttccctgtcgaacaaagcaacactctgccttcttgttccagctctcatactgtaaacaagtgtctttttcactatttagtgccattttttttttttgcatttgtgtgctttttcatggtgcttttgctgtttcaaatggcccccaagtgtagtgctgcaggactgtgttctaagcgcaagaaggctgtgatgtgccttttggagaagatacctgttagacaaacttgttcagccatgagttctagtgccattggccttgagttcaatgttaatcaacagtatgtagtaaacgtctttaaaacgaaacacacataaaacaagctcacggattgatgggttgacataagcgttgtgaccaaaggctaacctaaccctgtatttcccctaggagcgataattcagggttctctaagtcagtgttgatggcaactttaaagaacacaactactgcagataacaagaataggctctatttgatgcaggaattttgcttagttttctgctgagggtctttttgacatctttctgtaaatctccaacttttacctgcaaaaaaggggagtttgattcccaccatttttcttactctgcttgtcttgtctgtctcccaccatcctgcctcctcttctcatgcacacaaactttcatcctccaccatctcccgtccactaggcaactatgacatctgcatgagcaaggggccttctctttgaaaggagcccttagaaaagtaccttggcagagaatttggtgatgtggccagaaagagccagactgtactaggagagcctggatgcagtactcctgttaccttccagcctcaggaacaggcagattggatggggtttagtgaggccaaggaaagggataattagtaagtatagcaactctcctctgcaggcaccatgacagctcaggagttttcaaatactctccaaatacattttaattacttttaaaacaccagcaaagggtcattcacaaagcaaaatcacaggggattttaaaggcgctgattttataaagttagcagttaaatgttttaaaagcttgttcctcttccatatatcttaccagatctaaaaataatatgaagaagttatttataaatgtggctaagtaaaatgctaaagaaatctctgttaaccgctctgttaacccaaatggttttggggttaaatctctgttctggcaagcatgacgctgtaacagtgagtgtcctcaccttgtagcgctattcgtactccctttcctttcctaaaactggcacatggattgagaaactagaaacctatgtttgtaaaaaatccaaacatacctaaaaataacaagttaatgtaacaaatttgaggaacttaccactcagatttaatagatactgtatttttgctatatatctttcagagcttttattttaaagaaaatattaggtatagttgaaatcctttgtaccccctcttatcctattccttccctcaagaggtagccatatctaaagtcagtgtaatagtctgttcttgcactgccatgaagaaatacccaagactgggtaatttataaagaaaagaagtttaattggcttatggttctgcaggctgtatgggaagtgtggtgccggcatttgctcggcttttgggggaggcctcaggaaacttacaatcatggcagaaggtgaagtggaaggaggtgtgtcttacatggctggagcagaaggaagagagaaagtggggaggggctatacatttttaaacaaccagatctcacagtaacactcactattgccatgacaacaattagggggatgatcttaaaccaccagaaactgcccccatgatccagtcacctcccaccaggccccttctccaacactggagattacaattcagcatgagatttgggcagggacacagacccaaaccattatcagtcagtgtgtatcatttatatccatattttatatttttgatacatatatatgcagctacaactcattgttttgtggattcttattcgtggtatgcaagcttcagtgataggcttttgtttttcatttcttcagcactcattttgagatctatcaggtggatgcttgttgacgtagttcactgatttctcctgtcatatagtatgccatgtgtgactgtatcccagtttgtccacttgcctattcatgggcatttccaatttgacagtttcaagcaatgctgccatggacttactgctagttagctatctcctggcgcatatatgtgagtgtgcaaactgagaagaactgctggctagagaagggaagaactggtttgttcagtattttcatctccgttattaacaaatttctctccaaagtcattgcatcagtttacacacccatcagcaaggtttaagatttctgttttcaagtacctcccactatgtggtattacgttttttaaagccttgccagtctaataagtgtcaacaagtgtctcttaaagttatattttctctattattaataagcatgaactttcatgggaacggtcattctgagtttttctccctgttaattgcctgtttataatattttataaacataataatttgctgatttccttcctggattgtttgtcatttttctgacctaagaaaacagaaaagcaatgcttgctatacaaagtgcagttcggagagggtttaagaccactaccatgaggccgggtgcggtggctcctgcctgtaatcctagcactttgggaggccaaggcgggctgatcacctgaggtcaggagttctagaccagcctggccaacgtggtgaatccccgtctctactaaaaaatacaaaaattagccaggtgtggtggcaggcatctgtaatcccagctactcgggaggctgaggcaggagaattgcttatacccaggaggcagaggttgcagtgagctgagattgtgccactgcactccagcctgggcgacaagagcaagactctgtctcaaaaaaaaaaaaaaaaaaaaagaccaccaccaccatgaattctccatacttcttgcacttctgcttcccccaatagacccctgcttcccacctcctgacccccagagcctggttctgctctctaccttgagaactttgggactaatattacgatgccctttattcttgatgacagtcaccatgagaatcccaggccctccagaagatccctcacccttggcgacccaatctccactcagcttcataccttccttcctttgactcaacttcctgtccaatcgtgaaacctgttctcagggcccctggaactcacagtcatcagtggtctctgatcacctccacctcttctgtaaacatttcctgcttgttgctccagtggaagctggggccccttgaagcctctgcttcccctgtagccctctcaggagtgggtcttttctctaccacgaggcctagaggtaaagcaggcgtcttcagtcctctttgtcccatccagaccattgcccaatctcatgccattgggctaaaccatcgggggttcagtcatctgtggttccccaggccacctcctgtgttccttgaaggcttcagctcccagccactgttactctctccaatccaatctcacgtgaccctaggcgacttaggtgatcctttccaaaagcctggcctcctggctacccagtctcctccccaccaccctgccatccatctaacattagtcacccactcccgggttacacctcaggccctgtcattgccaaaaacgacattattcagagtcctaatttcaaacatcccgctcttccctcctagctcactccctcttataccctggctccaatcccattccctcaaccctacagggccccacttatcctactggctatccattgtctctcctcatgccctcactgccctcctcaccctccttaaatttcaagtctactgctgcaaccaactctccaggcctctcttgatgatactcagactctaccacagcctgcacctatgggctggatgtgcctggggaaaagcatatctctgctgactggtctcatgaccacaaccacacaggggcctgtggtgctcctgggggcagcatggctccccagacctctaccttcccaggaaactaggtccttctttcccttctcaaccttccagtacctttgggccctcattttacctctgctaattggctttgttccctattttactgaaaaaatggaggaatcagaagaaatattccacaaatgtttgaaccacttccgctgttctgtgtctgtgactgcaccctccagccccgctccggggaatgttcctgatgctgcgtctcattgaggtgggggtcaggggaggggtgctcccatctcctgtgcccaaggtccggtcccctcggacctgcttgggggcttcgctccgcaaacttcccctcaccctgctgcatcatcaaaatggtcatgcagtttgatggtcattcccaccagcaaaaaacttgatttttcctggaaaaaaaagaggccaggcaccctggctcacacctgtaactttgggcggctaagacaggtggattacttgaggtcaggagttcgaaaccagcctgggcaaaatgttgaaacccctctctactaaaaatacaaaaattagccgggcgtagtggcatgcgcctgcaatcccagctactcgggaggctgaggcaggagaatcgcttgaacccgggagatggagaaggttgcagtgagccgagatggcgccattgcactccagcttgggtaacagagcgaaactctgtctcaaacaaacaaaacaaaaaactcaaaagagttagctgcaattcttgtcatttcctctcagtctctttaatgaaataatggtttaacgaagagaagccaagctttgtcccgaaagtgccccaacgtccccgggactcgcctgcctcgcgctttgccccgcaaagggaccttccttggggtgctgtgtgccccacagtgggttgaccaagctgcctatggcagggccctaatgtgagcaccagtgtggtaactgaaggagcagtttggtggcctggaatggcgtgcttagggccaacccagtccttccttgcagatgaccctcacgctggctggttttcttccaaattggtgccaatctaatgatatttccatgctcaaaattatgtcaatggggagaatggggagacattggtcaaagtacacaaaactttagttagacagaaggaggaagctcaagagacctgtcatacagcatggtgactagagtcaatatattgtatattgaaaattgcaaagagagtagatgttaagtgttctcaccataaaaagtatggggagttatgtatgtgttaaatagcttgatttagccattccacgatatacacatgtatcagaacatcaggttgtataccatacatatatacaatttgtacttgtcaattgagaaattaaaatgtatatatacatctcaacccaagccttcctgtctgagcactgttgcgtgcttgtggctgtgttgttctcccacttcctgagctgattctcttcaggtaaatgaatcagtgtgggtagatccatttcattttgcctcctaggcctatctgaactgctgcgaggactggttctgacgtaggagctgcttttgtgttgaattgggtttgtggcaatggtgacagtcagatgctgtggggggtgaggccaccctgagctgggggagggtgtggggcactagttgtccacccgtgttccatgttaccatatgaaaaaagtagcttacagagcatgtcagtacagcctgttctcttcttaaaagaaaactggcagggcatattggctcacgcctctaattccagcattttgggaggctgaggcgggtggatcacctgagatcaggagtctgtgaccagcctggccaacatggtgaagccctgtctctactaaaaatacaaaaattagctgggcgtggtggcacacgcctgtaatcccagctactcaggaggcggaggcatgagaattgctcgaacccagagaggcggaggttgcagtgagccgagatcacgccactgcactccagcctgggcagcaagagcaaaactctatctcaaaagaaaagaaaattatctgggaaaaaagacttaaatgctgagcaccaacatatgagctgttgttatctctgagtgtgatgacgaggactttattttcttctttttaactccaattcctaatttttaaaaccaaggatgctgtgttaaaaaacccgttagaaaaattaccagtaacaatcaagaaagacaggactagcaaaataatataagaaacaacctaaagggtaatcacagcaaacttccctaggttgttaaacatgagagaaatgccaggcttttatttagagaaagccaatttgatttggaagatcatcaacctggtttgcgaagtcattgtccctggggccttattatgttctttctgttcttagaagagacctgacctgagagattctcagcaaagcacaactaataatagaattaaaatgataacagtttggattatttagcctaacagaaaatgatggcttaaaaatggtctttaagttagtcaagaggttttaggtgaagacactgatcaattgttagccattttcataggggacagaacaagaagaaatggccctaaattcataaagagagagcttaagagtgatccctgccagggaggctgatgaaacactggctattgatgaacactgggctccctcagtctaggaggactcaaaagaggaaacaccatctgtcatagaagatctaggggatattttcctgaggcaggctggccagaagcttccttcaagttccaatcctatgatatcttcatgaaggtgtaaacatacctaatccattcctgaatgacctgtcctggaactcagtgtctgtttttggccaggcccagtcctaggagagctggtggccatctgtgtaattggagggctgccaaaataccatttctactgccgggccatgtctgagatcctaccgggcaacagtcactttttggtcatcaagtacctgatggggaccgggtgcagtggctcacacctgtaatcccagcactttgggaggccgaggcgggcggatcacaagaccaggagatcgagaccatctttgctaacactgtgaaaccccgtctctactaaaagtacaaaaaaaaaaaaaaaattagccaggcgtggtggcgggtgcctgtagttccagctactcgggaggctgaggcaggagaatggtgtgaacccgagaggcggaggttgcagtgagccgagatggtgccactgcactccagcctgggtgtcagagtgagactctgtctcacgtctcaaaaaaaataaaaaaaaaatcccgatgaggtgtgagtaatgcacttatggttttcttttttttttttatgttcagaaaggaatgtttggggattttgagataactagtttagaattttgtctcttgaggaattattaagaaaaattatccaaaacttagaactaaggcaaagtggaaaggggcatgtcctctcaatgttgtgctgggacactgtgtgacaggctgagccaggagttgttttgagggagaatatacctgtgtttaactttaccgtttactaggtgataagcccaaacacagtgaagtcacacgtaacttgtcaatttctgtttccaagaaaagataaccagaaaggttgtagtcttattcctgtgtaggacattaaccagtttgtgtgtgtgtgtgtgtgtgtgtgtgtgtgcacgcctgtttgaatcatggctttgctctatcacccaggctggagtgcagtggtgcaatcatagttcactccagccttgacctcccaggctcaagtgattgtcaccactcagcatcccaagtagttagggcccaaggctgcttgccacctacacccagctaatttttgttgttgttgttgtttttttttgtttttgtttttgttttcggtagagacggggttttcccatgcttcccaggctggtcttgaactcccaggcttaagtgatccacccacgtcagcctcccaaagtgctgggattacagatgtgagccaccgtgcctggcccggttttatatctaacctagcagtccttctcgcattctgttttgttcttaaatgctgatgaattccacaaatgctctttgattcctctttactatcctcttggcttgctcattaatgagttcaatgttcattttatatttgtgtgagagtcatgtgtttagattttgaaactcagtactttgacaggaaggagaggagacattagggcaataactttaagagtgtgacattgattctcctctgcctaagatgaatatatggtcattccttgaagcaggaagatgaatcagttctcaggtgacccatgaatagttaatcccttggtgagcaagagctaattggattttttttccaaccttaacagctaactaagcaaggtctgcctggtgggttgtgggtgaagccaccctgggaagccagggtgggaaagagggaattcttttttttttttttttgtgagacagaatctcgctctgctgcccaggctggagtgcagtggcgtgatctcagctcactgcaccttccacctcctgagttcaagtgatttttatgtctcagcctcctgagtagctgggattacaggcacctgtcaccatgcctggctaatttttgtatttttagtagagatagggttttgccatgttggccaggctggtctcaaactcctgatctcaggtgatccacccaccttggcctcccaaagtgctgggattacaggtgtgagccaccgcgcccggcctggaaggagggaattctggctgctgtcgtgactggggttctgaaacaagagccctggtggatgccagggtcgaactggagaatcagatttcagaggggaaggaattcagggagagacaagttctggtgtggttgcgggagaaggtggctgaagtgggacgggaagctcattggagcagaggagttaaggcagagagtggctgggagtcaaaggagccgcctgtggcggtgctgagctcctccctgatggtgacaggccctggggtggcaacaatagcacctgctctgggctgtctggagggaagtggagtgcctgggggagacccagaccccaggcatggccagagggtggaggggccctgggagggaaaagggtggcagtgaaagtctcttttaaacggaatggggggaaggagtgcaggatagcgggggttcatgttgcagatctatacagggaatgagggtctaggagagagctgtttttttgttttgttttgttttttgttttcttgagacaaggactctgttgcccaggctggagtacagtggcaggttcacagctcactgcagcctcaacctcctgggttcaagtgatcctcccacctcagcctcccaagcagctgggactacaggcacccgccatcacgcctggctgattttaaaatttttttgtagaaacggggtttcaccacgttgcccaagttggtcttgaactcctgggatcaagccatcccgcccacctcggccttccaaagtgctgggagtacaggcgtgaggcaccgcgccaggccagggccaatattttggaccaagccaaacgatttctaggatgagaggcatgaatggagaaggccgtgagagacccatccatccaccgtgaaaattatctggtgacatcaccagagggtctgggtgcctgagtgaggtcgcagccttcgccgcccaagcccaaaggcacagggagggcaacctcagacacccgcttgtagggcagggacatctcctgttaggctttcctcgggaagaaaaaagggaggaagtggcctcccctgcctcacccgcccgccgctggtgaaagctcggggcagctgacccacctgcccaagccatagaatgcaacagcggtgcctgcagcttctgtgcctgcggggcttatcttgctggtggtcgacgatctgcagatggtttaactccactcctgtctcccgccctggggctgccaatctgtccaaaactcagctgcctgctggtctgcactgcggagggcttggggcccccactcgaggggcctgagcttctcagaggcgtctcctgaataaaacaaaacgccgtgtgctgcgcgctttgtgtgggggctgcttcactctgtgtctctcgatcacagctgcaaattccagttttatctgttgtgtttttgagcctgtttgcttttgattacagtttggttttgaaagagaagaggcacacactatccagctccctttcttctctctcagatggagcaatagagcttttttatagtggaatcggttttttccattattgcgcatttaattttattattctaccgccttgcattttgaattgcataggggaagaaacacataaaagaatactcccccgccctgcccccctagttgattgtcgaaaaaaaaaagatgtagcatgatgattttttgcctgtgaccaacagaattacattttacgtttgaaagaactctccgtgtgaacgctgtcaacacaacagatacggatacaagattcaaagtacggtcaacccctcacatcacacgcgaagtccatttcctccattgctgatggttctctccaaggccgcaatgtgccgcagagcacggtcgcttgggcttccgaaaagaagctgagtacagtattcattttgcgcatctgcctttctattcaaaccaactgaaaacatcgtttaattccaggtgctctggtctagctttcgttacagccactgtggctcccagttacttcttcatcaccctggtctttgttttcttgctctggaaagaggacaaggaaaacctcggtctttggaatgaagtgtgtcccttacttgctcaaacaggcttgcaaaagatctggttgcattttatatgaagccttgttacatgttgtaaagttttcgttcttaggtctgaatccacatttcttaccattttctttttctttatttttatttttatttttttgagatggagtctcgctctgtcgctcaggctggagcgcagtggcgggatctcggctcactgccacctctgcctcctgggttcaagcaattctcctgcttcagcctcccgagtagctgggactacaggcgcccgccaccacgcctggctaatttttatatttttagtagagacggggtttcgccatgttggtcaggatggtctcgaactcctgacctcaggtgatccgcccacctcgaccccccaaagtgctgggattacaggcatgagccaccacacccggccaccattttctactgtgttttcttaccacagagctgggctgagtaggtatttaaataaggggctaatgcctctattgttatttctagtaaggaaaatggaatcacaggagagggcacgtgccttgcccgaaatccccacaatttaggggaagggctttgatgacatcctgttgcttctgtttcaatttgtacaaataaaagagaagcaaccgtatctaatctgtaagatagttttttttatttttatttttttattttttaaaaagggaggcagatgaccaggcgtggtggctcacacctgtaatcccagcactttgggaggccaaggcaggtggatcacgaggtcaagagatcaagaccatcctggccaacatggtgaaaccccatctctactaaacatacaaaaatcagctgggcgtggtggcgcgtgcctgtaatcccagctacttgggtggctgaggcaggcgaattgcttgtccctgggaggcggaggttgcagtgagctgagaccgtgccgttgcactccagcctgggcgccagagcgagactccatctcaaaaaaagacagaagtacatctaattgctgttagatttaggataagaacgaagactgatctgcttcctgctgacagagggtgccattttggggaaacggcaatcagagctccctcagaggcctacgtaagggtccctggcagaaggggctattgtcagaggttctggttgcatgaccgcttggagtttgatggcctgaaggcaagaacagacaaatggggttattagaaaacatgtgtcaatacgaaacaagtgcaggggtaaggacaactcagaaattccgaggcattttaccagtttgcacagggagagggaggccaaaagcctaactaactggttaaaaaaactttacccttttgccggcatgttgggcttctgggtttccttcccctgaacccagtcctaagccaaccagtttaaggtttgggaaattaactctttccagtttggaggatgcatctgaggggagggtcccatagtacagagacacaattacctatcagtgaagagaggacagaggaaaagaaaggaaaaagagaaggcattttttcaaaggagtcccagggattcaggatgcattctaaaggggcacagactgaagatgaagggctactcatctagaaagagaggagcaggtatccctggctcccttctcttcctaacagatacctggggtacttgagggagaaggggaagagcatcctctttccctcttccatccttgcattcctcgagtcccggtgaccttggcaggtcctgccatgagtgctaaagcgacttgcacccatgaagcagggagggcctagagaatagaaactatctgctctcacctatgtctctttccgacctgctgtcagtagccttggagttccctggacctcatttatgccatggatattaaggtggcctttatccatgaaacaggaagcttgggcttggcttaatcagcaggaatcaaccaccctcacctgcgcggtgccttttaacttctgtttttgtctgcatctggatctcttagatccagttttctttcatagggctttgacccaaagcttggaattgagtttaggataaaaatatgtctctggggggttgcatggactccttatcataagctgaatgctaaggtgaagatgtggaactgagtcctccaacaagagagaagaaaggatgtcttgtgacacacccagataaccggtagctatagttatgctttctgggatttggctgcatgccacttggctttggttagctaccttggttttactttccccccaaaaagcctctgggtgatggacatcctatttattcccatcacctggcaggatttgcaggataactgctcagaactagaatattgatccagatttttacatttcccatccctcttgttctttctgagctgcagctggagattgctggttggttcacaggaagaagcagggttagtctaaaatgtaggcaaaaacttaaaaacaactagcgagtttagaatttaatgacaaatataagcttggaaacatgatttctctctctccagtcctcatgtttgttaaaaaaacaaatgatcataggactgaatggttcgcaaaataaactttagtcttattcttggcttgattatttggataaagtgcagcaagaataattatttctacataggccttttggattggctttgatggaagtttgttccacaagaagtctcagataagaccttctaaagctgagcccaaccatgggtttgtatcctcaaacacctgtgagttggatgattttctcctcttaaggtcccaagataaacttggagctcctagacctgttagacctgttagaaagtgacattccacaggtcaggaaccctgtacagggactgcacagacgagcgtatgaggtcagtttcccccatggggcttttatcggctctgcgaatcgagattgactccttaaagggaagcatacccttccagtcaaagccttggtaaaataatcactttctccaattgtgtcctgttgcaaaagaaaaatggattcctattgcactgatgcaaacaactatattgccataagaatactcatagatagtttccaaattctagaggaaccaggcagagagaaacaaacatgctccacgttttcgttcataggagtataccttactcaattactaaaggccataatagttcaaaacaagtttccttgactatgaaaaacaaaacaaggatcaacaatattccaagaaaaagtcaaaaagtttacttcagcttcgtgagctcagcttatttagttaactccagttttgtttgatatttgtgaacatttctgctttttgtgagtcctgtacattttcctttattccagtgtcacagtctccaaagttatcaaacctgattgtctcaaatacaatcagaaattgtatctgaaagcacctgtcagagtcttataccctgttataaaccatcttttgaaaaggattaaaacaagacaacaattgtctatgaacagcagaatgtccagagtagttacagttagaaacacaattgacaaagaagtttggttatctctgtggtttacaataacttaacataaaaaccttaattatggttgatagcatatactcagacattagaattttagaaatcctgtacaattttggaacatatattagcattattcaccaagatataacctaaagaagattgagcatcattttggcaatcccatgtacctaaacatgtcaaataatcctgtttacttctcttttctggacactccaggggccctctgaagtattcaaaaagcaagatgtcaggaaagacaattttgaaactgaagtttgattttgggaaggctagtaaatgtttgaggtttaaaacatttgctattatgaaatagagttccagattactataagttatttattttgccaaagtgatgacttagaaatttaaagaaacaaaaagcttttataaacctttataaactttgccaaagagcagattagtattttaagaattccttgttgtgtttttatttcaatactcaatttacagaaaaaccatatgtttgaaatgtttgttccctggtgccgtaaagaaagagcacttgaacataaatttaattttctcagcaaggccatttttatatttttggcagaaaagttacacttgccagcagttttgccatgagagtatatcgaacaaaggagacagggtcatttataacctgacgcgtccaccctactgctgtgtctggttttcattggcaggaacgggaccttacgttttgtatttgtcctgattggccagcaacttagaactttttaaaagaggcaaagacagaggagaataaaggaaggaagaagtaacttgtggaatgctgagaaaggtaaaaacacctttaaataaagaagaggaacaggctatgacctaatgcttgcttggaccagtataagcacgccaaggcaaatatttaggctaaactgtgggacctaagaatatgaagtatattgacttttttattacggctagcagctatttaagaatgttagcacaggtctttgaataaattttgattttttttttttcttttttagacggagtcttgctctgtcacccagcctggagtgcagtggcgcagtcttggcccactgcaagctctgcctcccagattcatgccattctcctgcctcagcctcctgagtagctgggactacaggtacccgccaccacgcctggctaattttttgtatgtttttagtagtgacagggtttcaccatgttagccaggatggtctcaatctcctgatctcgtgatccacctgccttggcctcccaaagtgctgggattacaggcgtgagccaccgtgcccggcctaaattttgtttttaagagaagttactatttattcctaattagatggaggggaaagtttttgaagaggaatctttgctttttacaggtataatactcttgaatttagctaatatgtttgcatagagaccctcttctgcaagattaacttccacaattcttccacttcttcttcgaaccttcagcttcttcctaatttaactcaaaacaatctttaaaccctaggtaaaggtttacatttccatgtcttcttataacttttcaccaaaaaaccacattttactgttcttacacaccttgcttgtaaatctatttctagtagtttcaattaactcctagcaatttttaactttaaggtaaaacttggtaacttgctttaattgtgtgctaagtgcagccaaggtttgactccagcataattaagggcatagctaattccatgtcctcagtccctaccagttgtgaagctgacaagtcaaatagttctcaaaaccccaaaagcagtttgtaacctcaaaacagttagcaaaccttgcatctgacctgcattttaccaatagtctttagggctgtttttatttcttaatgattaaagtcacgtgaactgaaaggtaccacagcttttaacttccctttaaaaaatattagatccaagtgcttgtctttctttagactaaattagttagaactctttttccaggcatcacacacagtacaggcaaaagagaacccagtcgctgggtgggaacctttaagagacagggctaagaaaacatggaggtatcaaatctgagagggctgttcccctcaggcagggttgctaaacaaagccttgccaagcaattaccagccatgcccccagggtgtaaagcaagatggaagcttgcaacataaaccatgcagacaagcaaagcacaccagattgaccacagcccaagactagccccacaaatcctttttcacaattaaaactttacagaaaatacaaacagttgtagttgcagggagcctggactagtaaagtgtcttctaaaagaaaaaaaaactttaaaggttaactttttgaccaggtagataaggggaaagaaaaaaaaacagtttaaaaatgcctggggaagaacttcttattcttatgcaagtggttcctccaccgggaagagaagtttaagcttaattactgtccaatagagttaaacaccttgaccatggatggagaaggctacggcagcagcatgtggctgggaaccagccagccagctgtgcaggactcttgggccatacttcccagccctggcagggcggggagatgctgctctgtggtgggtcctgaaaaaggaaggaaaaggccatgaaaaggcccaggagtgatgggaaagaggggatgggggtgtggaaaaggcttagaagcagcaatgagaggttttgagtccccgtttcactcactgcttctcgagccccatgttgggcgccaaaaatgttgcaggacttttctttagttcagctaaaggtggggttctttgaaaattcaggctcgcagacaatttgaatggtgagtgagacaggattttattgagtgaaaaggaagcaaagggggaaacagggactcttattaggccagggtccctgctagagtgtttctcccccacagctcaaatgccaggctccatgcaggaagaggaggggccaagctcaggctctccctgctgcaaacgtcttgaacttcctgaggctgcacctcagtggggaggctagttggagtttctccagggaccccttcccacctggctgtctcatcatcaggtgacccctcttctcatcccaaagcactgagcttttgtctataaattacaaattttatcaggaattccagcaacatattgaaactaaaaataaaaacaaaccattgggggtatttttaaaacttcaaatcaagtaatctatttataccaaaaatgtcatcatcattataatactcatttgtttgttatagttattattttatctactgcatgataaccttaaaaagtagttgtgatcactcccattttcagatgaggaaactggggtttgaagaagcacaatgctttttgaaaatcccccccagctcttgtgtctccaaagcctggccttcctcactatcttacagtctgccttctgacagtttctgaaatctgcaaggctcaccatgtagctggtgccacagtggcattttcagaggggtgctgcttcctgcagaatgcacttgacgtcgggtagcacagcagggtgcggtaatggtgacaagaatcagctgcagtgtggtttcgatgttttccaacaaacattcctccaagtgtgggagcagggagcacaggccatgccaccatctccagtgggtacagttctacttggtaattagataaaagatttgggcagacacggttttgcatctgcaccccataatgaatgtgggggcagttctgaattcagggacaggaggaaaccataatatattcattcattgtaattacttgggggtagttcttgcaggtagttcttttgctaacccccacggtacaggctgggtccgaggcaagcttcctgggcctgtgggtagagttctagttcggtttcaggagcaaaatcactctgggtaactcctatctttatgctggtggctccttccagttcccagtctggcctgctcttcttgtgtggacccagaaccccagctcagctggttaaacctatatttgactttgctgggccttggactgtttatgagactttagctatggctcactgatctgtgttatccctttatttctgggctttctgtttggttttgagctcagttaggtaatagaattccttttttttttttttttttttttttttttttagacaaggtcttgctctgttgcttagggtggagtgcagtggcacaatcatggcttactgcagccttgacctcctggactcaggtgatccttccacctcagcctcctgagtagctaggactacagacaccggctaccatgcctgactaatttgtttttattttttggtagagacgagttctcactatgttgcccaggctggtctcaaactcctggactcaggtgatcctctgcctcctgaagtgctgggattacagtcatgagccatcgcacctggcctgtaacacaattcttgtgtttcattctctttctctggtggctggattttgggaatttcaccagattatgcccaagtgggattctcttttttgcttttcaaattattattattatacttgcttggtacttatagtttacattctggtccccaaattggtttttattcagttaaggagcattttcttctatttgtttgttaagtttgtttcttcttatctttccctgcctttttttcaggaatgcctgatattcaatactcaatagtcaatattctcacagtagctgatattctcgaagctgtattcctgtctcttatatttttatttatgattttcacttcactgaatttttgctccatgttctgagacagtttctctttgatcattcagatcagattgtttatgggtaccatcaggagatgggttaaggctgaaggatggatggaactctgcatttttcatgctcattgttcagggatggtttacatctggatggcaacaggatcccaaatcccttgttggggatgctactttggtaagggtgcagcttcatactctgagtctgaccccagatggcatttccaatctgatggatcccaggatgaatttagcttctagaggcagtagcagtacagacggttttgaagttgagtttatcctttgaccctcttggttatttgttggactcagttctctctgctgcttaaaggacccccatttgctcatcaccctgcagcctgttctggttattgtcactgtttgtctctgggtcaacttcctcacaagcctgtgagttccatccacctttgcacctgttttagtccactcaggctgccataacaggataccacacacagactggggggcttaaacaacagacatttattttctcacagtcctgggcactgacagtccagatcaaggtgttggcaggtttggtttctcctgaggcctctctccctggcttgcagatggctgctttcttatttatttatttatttatttatttatctttgagatggagtctcgttatgtctccaggctggagtgcagtgtgcagtggtgtgatcttggctcactgctaactccacctcctgggttcaagtgattcccctgcctcagcctcccgagtagctgggactataggtgtgcgccaccatgcccaactaatttttttttttttttttttgagacagagtcttgctctgttgcccaggctggagtgcagtggtataatctgcaacctccacctcccgggttcaagcgattcccctgcctcagcctcccgagtaactgggactacaggtgcatgccaccatgcctggttaatttttttgtattttttgtagaggtgaggtttcactgtgttgaccaggctggtctcaaactcctgacttcaagtggtccacccacttcggcctctgaaaatgctgggactacaggtgtgagccagtgtgcccagccaagtttcttcttataaaacaccaatcagattggattagggcccaccataacgacctcatttaaccataattgcctttttagagacattgtccccaaatatagtcacattcttaggtaccagggataagggcttcaacataatgaattttggggagacacaattcagtctataacacactcctagagcttaatgtaggcctggcttatagtaggtgcccagtaaatgttgagggcctgattgaagctttcccaaatgtattctctttccccattttgattttcaagcaaattgtgatgcctaggatggcatcacactttttctttttcttttatttatttttacacagggtctcactctgttgcccaggctgtagtgcagtgatataatctcagctcgctgcaacctctgtctctcaggctcaagcgattctcccaccttggcttcctgagtagctgagactacaagagcacaccctccacacccagctaatttttaaactttttgtagaaacagggtttcaatatgttgcccgtcctggtcttgaacacctgggctcgagatatccatctaccttggcctcccaaaatgttgagattacaggcgtgagccactgtgcccagcccaaattttttcttatgctaaattaagaactattactatctcttattgcctattttcagtttatccttagccagtcattttttgcaagcaattctatagtgtgtggatacatggtctttagtttttcttctatttcatggtgaagagatgagctctatgcctgtggtcagtttcagctgatagtctctgtggcaaggccactgaatttttcacaacaggcctgtgtgtgtttctctatggggatttgaattgtattatagcatgctggatttaccttcttgggaatttagtttcttttttatttctaaacatgttttctccatttcattgtatttattcttgtgctctgccttaagctctgacaaatttgaatttttcaaaagcacagagaaatgctttatgtcagttatttgcaggtgttcttctagtttataataataacaaaaagatggaattaaacatcttttcctttggctattccattcttttgcattcttcatttttgtattttgctttgtctcctcattgaatttttgatctctgaaatagcaatttaaaataactatccaatggtgtatgtacccacaacagtttcttgccaagcatgcagaatgaatggattccttattcacatgttaaatgcctacatagcagagtctatgtatagcactgagacggaagtctggaattgggtcctatgagggatatcatcaagatgacagcttccagtgcatttagaatttcattgaatgtaatagttcaccaatgctatctaataaaacaatgtgattctcttctttacatggcctcaagagcccatagaaattcacgttctggctattctgaacttcttgcaatgacccacactttcttttttattttttttgtttttgagatggagtctcactctctcgcccaggctagagtacagtggtttgatcttggctcactgcaacctctgcctcctgggttcaagcgattcttgtacctcagcctcccaagtagctgggattacaggcacataccatcatgcccagctaattttttttatttttagtaggaacggggtttcaccatgttggccaggctggtcttgaactcctgacctcaggtgttccacccgcttcaacctcccaaagtgctgggattacaggggtgagccaccgtgcccagaccatgactcacattttctatgctctggttgttttctggcttgtaaacatggcttttgcctgctgagaacacttttcctcccctgctcactgggaagccttcctgaacccaaactagcctaggtcctcttcaagctctcttcaggagcttccaaaaatccttgctccttctcctgagcatgtacttgtttgcaagtgattgttgatatgtctcttccttacttttggctaagggttctttctgtgccgtggaccatcctaggcagctgatgaagtctatggatcttttgccagagttatgttttaaatgcataaaataaaacacactgggttctagttcagggcaagttggagtaagcacactccaccctgactcccggtgaatgttgctataaaacccatacaagaatgtatggaatagctacttaaagactctgaaaagcaaagggtagccagcaaattggtaaagaagacagaactcaagtaccgctgaactggtggtgagttaccatttttcccccctccagaatcacctggtctggattcagtgcagtctgaaaacccagaagtgggcactggtgcagacagagagccccagaggagccccctagtctggcttgaaggagcagaaaggaagtctcctaatacttagaaggagtgaagaaaccccctgttttgttttgctttttcttttcttcattctcttgtgtcccagcgcccaggcactcctgtggtagtaggggcacaagagctcacaggagcccaaaactctgaggcaggagaatctttcctgaatcagaggagctgctgtcccaagagagtgaagaaaatccctaatgctttttttccccactctgttatcctactgcttttccctggacacagatacagttgtgggaagtatatagcagaacaggctaagtaaagccccggctttctggccagatgaccaaaaaattgagctcctgggaacaggaaagtactaggaagtgggaagagctgggaaaagcaaccctataaagttgtttatgaacttctagacttacccctgggatatacacgaatagaacttaccctaaataacatagacagactaagagaactgaactacaaaataaaccattgcccaggtctcagactggtcactggataatgtacatatacaaagggatagatctgaagtattggaaaacagaactgatattggaaccataatccatagaagaccagtgggacttgtgacctgaactcagccagatcgatttcctactttaaaaacaagcaaaacaaaacaatattctctataggatttagataagatctagagtcttataatcatcaaaatatccaggatacaatcaataattactcaacacatatgaagacttggtaaaatttcaactagtatggaaaacgacaatcaacacgccaatgctgagatgacacagaatttaaagcagctattataaaatacttgaacatataagggcagacattcttgaaataaataaaaaaaagtcttagaaaagagatagaagatataaagcagaaccaaaagggaatttcagaaatgaaaaatactataactgaaataaaaatctcactggatggactcaatggcagaatgaagacaacaaagaagagtgagtgaatttcgatatagatcaatagaaattatgaaacctgaacaatatggagaaaacagatagaaaaataaaagagaaccaagctttatgaacccgcctggaaataccaaaagtctaacactgttgtaatagcattcgtagaaagaaatgagaaaatatgtggtaccttaaaaaaattcaaagaaataatggctgaggccaggcatggtggttcacacctgtaatcccagcactttgggaagctgaggtgggtggatcacctgaggtcaggagttcaagaccagcctggccaacatggcaaaaccccgtctctactaaaaaatacaaaaattagccaggcatcatggcgggcgcctgtaatcccagctactcaggacgctgaggcagggagaattgcttggatctgggaggcagtggttacagtgggcaaagatcgcgccattacactccagcctgggcaacacagtgagactccatctcaaaaacaacaacaacaacaacaacaacaacaacaacaacaacacggctgaaagtttctcaaatttggagaaaaacagaaacttacagagtcaagaatcccaggaaatctcaaatagaataaacccaaagaaatccatgcccaaacacattcttattaactgctgcaaactaaagaaaacatatttccagaagccagagaaaaacagcacattacttatagggcaacataattcaaatagcaacagattttacagaaggaaatagaacattttttaagtgctagaagaaaagaactgtcaaactacaattctatattcagtaaaaatatccttcaggaatgaagataaaataaagacattcccaggtgaagaaaaatgaagacttcgttgtcaccacactattgttacaggaagttcttcaggcagatgggaaatgacaccagaagaagatatgaagagcaacaaaaatgacagataactgggcaaacataatagactgttcttcttctcttgagttctttaaaatatatttgatggtagaaagcaaaaattataacatcgtctagtggggttttcaatgtatgttgatataacaaataagacaaccacaacataaaggaggatgggtaaagaaacccatatatggtggtaatatatcacttgaagtggtaaaatatacactgactgtaaaaagttaagaatatatattttaatccctagagcaactacttagaaattacacaaagggatagtcaacaaaaatgcaataggtaaaatagataactaacaaatgtttaaccaaaaagaaagcaaacaaagggaaaacatagaaactgaaaatacagagacaaacagtaaacaaacaataaaatgataggcttaaataaaaacatcagtaattacattaaatgtaaatggatcaaacatactaattaaaagatagatttttagaatggatttcaaaaaatgactcaattatatactgtctataagtatataattaatacaagtgtttcagttgtactcacttcaagtataatgacataagtgggctaaaagtaaagcaatatatattcaaaagatgtatattattaatgagaatgaaggtagagtgtctatagtaatatcagacaaagtggacttcagagcaaagaaaattaccagggataaaaaggggcaatacctaatacatttcatcaagaggacacaacaatcctaaatctgtatgtatcaaacagcaaagcttgaaggtacatgaaggaaaaactcacagaactgagataagaaatacacaaattcataattatagttggaaacttcaacattcctctctcagtgatcaatggaacttagtaaacagaaagtcagcaagtgtatagtatagaaaatggaactaaatgataaacaattgtttctaactgacatagaatactccactcagtaacagcagaatacacatttttctcaatttcacatggaactttcaccaagatagaccatatctggggatataaaacaaatttgtcacacatttaaagaatcaaaatcatacaaagtatgaaaaacagaatgataagaaaatttacaaacccttagaaattaaacaacacacttgtacataatctgtaggtcaaagaggaagtctcagggaagttagaaaatattttgaactgaatgaatataaaaatatatcaaaatttgtgggatgcagttaaagcagtggttagatggaaatttcatcattacgatgaatttgtattagaaaagagaagagtatcaaaccagtaatctaagctgcttccacaagaaattagaaaaagaagagcaaaataaactcaaaataagcaaaggaaggaagtaataaaaataagtacataaatttaaaaaatgaaaacaatttcaaaaacaatacagaaaaataatgaggagttcaataaacctctggtgagactggcagagggaaagatagaacatgaattactgatatcaggaatgaaaaaagggttatcactacacaccctgctcataaatttgaccatttagataaaacggatgaattctgcaaaagacacaaattaccaaaattcacccaagatgacatgtagataacttgaatagcactattagtattttaaaaattgagcttgtattttaaaaccttctataaaaggattcttcaggccaagattctagcacacaccatatagcatatgctaccaaatatttaaacaagaaatatgataaattctaccaaatattttctagacataaaatgaactgtacacaatctcttccagaaaatagaagaggagggagcacttctcaactcattttataaggccaacattaccctggtactggaaccagacagatggtacaaaaagtacaaaacactatccctcatgaacatatatgcaaaaattctcaacaaaatattagcaaatatccattaatacataagtatacaaagagatagtcaataatattgactattagggaaatgccagctaaaactctgatgagatataacctatggagtgagacacacctattgaatggcaaaaataaaaaatactgacaatactaagtgctcacaatcatgcaaagcaactggatctctcatacactgccaatgggaatgcaaaattgcacagctactctaggatcgtcctgcttcagccttctgagtagctaggactacaggtgggcaccaccatgcttggctaatttttagtattttttggagagacagggtccaggttgcctgggctggtcttgaactcctggcctcaagctgtcctcctgcctcagtcttccaaagtgctgggattacaggtgtgagctattgtggctggccctactttgcagtttcttataaagctacacacacaattgacatatgactcagcaatcccaagtgaactgaaaacttgtattcatgcaaagacctatgcatgaatgtttatagcagctgtattcattatcactaataagagaaaacaacccaatgtctttcagtgggtcaatgggtaaataaactgtggtgcgtttctacaatggaatactactcaatttagcaataaaaaggaatgaactattgacacacccaacaacttggatgaatctcaaagacattatgctgagtaaaaggagccaatctcaaaagttctacatactgaatgatatactttactctcaaaaaggtgaaacacgtgacagagaagaaatcaatgatttctaggagtgagagtttagtgaagacaatgctgtaatttcttcccatctaaattccttagacctctgcgttctaattatgaaccacttggagggagggtctatgtgtcccaagtaaaaagcctgctctatgctatatgccttgtaggaattgtatcttttttgttcattcttctatgtcccatgcctagcagagtaaactggcatagattgggcactcagttattcggtgaacaaaataaatgaatgaacaaactatgaaatggtttcaacatccaacaatgcattgagagcctctaaaaactttaagaaaaatggacacattttgtttaaccgaacacgtgatcattgttgataattgtgggctgcactctctctaatgactctcctaactgtacgcttctgtttgggctactgaccaggttttgtcttgtgtgagtctacctgcaccatttctgagcatttctcctgcttctgtcctgtagaagcaaaacaattagatacacgaatcccttctccagaattatgcagctactgtcaaccaaaaatggtggataactgccaatgacgtacatgttggaattagtgtttgagatttatcagacactaacatatgacaggacttgggcggtgctgagataataatgaggccttgcaaatgggcatcactcagcattgcagggagtccagggtgaggggcaggactggactagctcaacagagtacttggcatgagggggcaacatgggaaatgtatagggactcgaaaactatagttggtattagagccagaggccctttgtctcatccctcaccaggagtaggggcccttagagtactgtcaccagaaggttctgggaaagttgtagagaccgaatgagttgctacactactgaccctgccatgtgccagcaatctccttgatggtctctgggcagtctgtttcacagacctgaaaaaaagattgagaaagcctatgatatcttatttcatcaagtccggtctacaatggcttgatagtaagaccagccattattttatataccaataggagaggaaaaacactgccaacacactgtgacagatgcctttaatgacagtcctgaatgacatatgaatcaatgacatcagattccttttaagttaatcttcatctcttctagagatttggcaatgaaacaagtaactcggcaatagaaagtaacacagcttgtccgactggtgggtatcttcctttgcgaggtttctggtgcacttgattgtttctttgcaagaaaatatggactcctgatcattctttctgtgataaatgtcgttcactaataccacctttgcatcctactgcttggtttctgtacctttctgactacaaaatagcttgttatttcagtgctgaatcgtagtgaaatttctttggggagattcctacacagtagttaaactctgaggttaagctaacaaatgcacagatctcaatcaaagtgataacaatgtgaacagctacagctgggtggatgcacatggccgatggcttttgaaagatactcctgattaagatgtatctggatctcagcaatgttagcctgtgaaaaactgtgcctcttaaaatctgtggaatacagtaattctgtccaattcagtaatttgggagggagagttcttctgcacttatgacatgtttcgtgaacatcctttgtctgctggggaatgttctagggcttcagtgggaaacaggctgactcccctgcccacatggagctcacactgagtaaggagaacagacaataagggaataaacagaacaatgttcatgttattttaagtgcaaggaaggaaataaacaggaggctgagatggagcctcacagtgggacgggtacaggatgtacatgagcatttgtgatgagccttctgatttccaactaagtcaacacttggatttttgtctctaagagtcactggcagcctgcagggcgatcacctgtccctaggtttgcccagaactgaggggtttcacgggatatgagccttgaactcctataatgggcagacccaagcatactagtacagttcgtccccctatggagattctaactcaagtttccttgtagtttaatatttttattactatttccatgtctaatgaagtttgatacttaaccatccactgtggcttttattatctttcactcccatctctcttattttcataaaaagagattaattctatagtacaactaaagtcttataattcttaaatgcagtcactcaacaccaccagttaaacacctacttaaagtccttcggggcctcaatgataggtcagggtatctctcaggggtaagaaatgtctatcgacagctagaagatcaggtagtggcacaaccaagcgtccaccaaagcctccagctgggagaaggtgggtggttgctaagcagggatgagggcagggcgagctgctttgtttttctaattttattttgttttggatgaacaattccaaccaaaggctttgaagaagagcaattttctttgcctttgaaatgagttaaaggcaaaacaactccatcctttcatgttaggaatcattttggtaaagtagtgcggctttctgtttttttttttaactaaaagacaagctgaactctggattgcaaatgctttcatggctattagaagtatagtttgtttgttttttctctttaaaacaatgaaatgcaaattcttggctttctcttcaagcaaggagcggcgaggggaagccactctggaggctggatgcagatgtgttgttgtcagtgacactacaatacttactagtttttgcaaagtcccagtgaacttcatgttcgttccctgcctttttagtctcaaggttgatgtgtaacaatgcctgtgcccactgtaatattccaaaactaccatgtcctttccattctttcccccgaccccattgtgtttcattttctttttctttttttaaaatttaatttaactgaattttaagtacagggcttgcagatttgttacataggtaaatgtgtgtcatggtggtttattgcacctatcaacccatcacctaagtattaagccccacatgcattagctatttatcctaatgctctccctccccccaccccgctgtgtttcattttcctctcatatctcgtgaccacataattccttctttaatgacaaattgtattgaatgaggtggccagtcttagaagtgctgtaatctgaaagaaaaaaatgaaactttccacttcatcactctggtatattattatttttaaaaagatgcaagttgtcatatgaaaatggaggcattaattccttaacctattccaaaactttagctcatatttgccaagaaaacagaatgcgaatgggaagccgtgtttctgcttgaggcagtaggaagcaggagaccaaaaagtcgtcttaatgttaagcaaaactttgaatcagcatttaaattagatatgctttaacggctaatgttatttgaaagctgaatagccaatgtcaaaaatagatttccctttctttccaaagtgcagacggggtccagaaaggggcaaaaataaccacatgcctttcttggactcctgactcttaccacccaaagggttttcttgtgtagcaaccaacaattccttggatggaaacactggataggctagtcattattttgagattgaagggactgcagattcttggcagacctctgttgtttttctagagttgtaggcaagtagttggacaaaaagcaagaagctgatcgatgttgctggctttggattctttgtgaacaaatgagacaaggtgagtagctgccctgctcaactccctcttcgttttggtgtggggcgggggtgggggtggggagggaaaggttctgatgactgcaatcctggtgtcggatcttggtctgttggaaaacaacgggctcgccggcccctgtaggaagacctaggcaatgtctgcatgctgcctgtgcagcccatggaggggttagaaatagtaggattgcttgtagagagagaacaatcactcaattgtcagatttttttttttcacttttcatccacacgctgggtggctttgtagcacagtcggagatactgtgttgaggagcctttgctcatggcaatgtttcctctgttcactttctgctgcttctgcattggaaaattccgtcctttaacactgggattatatgtcaccgttgctgaaatcatagacagagtccacttaatttggtgcgagcatgagaaatagccagagaatgggagaagcatagcattcccttgtataaagagaggattgaataaggtcagtgaaccagagacagcaggtcacaaaccctcagagggtcatgaaaatgttccctggtttcctgcctttgggagcaaaacggatgcctgtttaaattttttaaaaaattattgaagattagccatgatacttgtttgagctgggtgagatatttgagggctcattatactagtttctgtacttttgcacatttttgaaaatttcaaatgataaaacattttttacgaaatatttaaatacctccctgcttcatctcagaacgattccagagcccctgagtgggtcccatgtacgcatgcgtggcagtaggggctgctcaactgagcatgctcgtgatttggcctcagtcaatttcactgtgtgctgagcccccaacgatgctaacccctgtgcggtttcaaatggcctttattcttagccatatgttctttggcccatatcctaaatggatcatttgttaaaggctagaaacattagcaacacagatgttgaaattcatgttaataattcagtaaattgcctcatgataatcttcactttatctgaagatggcctttgtctcgtcaaagtctgcccctggacctcagaaacccagtgttacagaaagaaaagacagggacagttatgtctaattttggttttcatttatagagaacaaatggttgtaaagaagtgattacaaatagcagctagctgatattttaagcacaaaatataagaatttcagacatgaggtcatgaaagcaatttttgatgccccaattcctggttaatttcaatttttattttaatctgagcacccaacagctgacacaaaataactcttttattgacttcctccttgtatctggtggccctgaaatggttatcataaaatttattgtgtagtcactgtttcctagctcttgtggacacagaaatggtagaagtttctagaaatgaggcatgtaggtacattgtaaggtttatgggttttagccacacactcttgaaacttggtgttaatcttcacatttgattaaaattttaaatatattgatattaaagattgtagctaacatgaaatttatgttgacgaaatagaaaatattttgactatcagtttctacttttgcatacacactatagtagatatcttctgtgtgtatctctcaccttctgacccatcttccacaccagccattgctggagcagccagctttgcgcaggtgtaaccagaaggtgccttgtttcagctgcactgcgtctctccatttctgccctgggcctctctgacacagtgtcctggtattgaggcttgtgcaacctggaagtgtaagggagtcaacattctatgaggaaattcttggccaaaagggggtgggagtctataaattagtactcccttttttcttcccctaggctgcaaattcagaggatcctcccagaagataagatggagcaggtcaccaccttcttccctgcttcacaccctcaggccccgactcttgtctgctgagatcactctccaaaccaatcttcccttacaaagcccttgttgcaggctatgctttctgaggggaacccaggccaagacactaaaatgacacaccaacatgaagacatgaacacaattgcaaagggattggttggattgcatatctctgtgaatgggactcaagagaagtttgggaaatgctggaccagatgacccttgcaatcatggtgcacagaattaaaaccgtcaagttccccatccatctctgagatggatgagaatctgagtcttccacaagatgcccaagacttgttaaacccgtggaatgtctttgggtatgtgtgacatcaacaagaagcagcagacaaaacaaaatattttcacaaacattcagaaatccctaaatcttgtgagttgtcgtatcatttgtagatataattataaaatggcacatgatgctgacctattccaaggcaattgttcatctcatggtagggtgtaatctctgcctgcagattaaggcagaagagaccaaggagggctgtttactccttcatgatccatcccaggggagggtgggttttggaccagttaggttatgtggctggctgctgaggattctgaacatctagttacctccctgtacctctgtcccatatactctaggccagtggctcttccctggattgggccatctttttctgaaggcaaattttccactaggaggaaggttagaaatgccagttcttgagttgcaccccagatctttggcagtctgttgcgatagatcttccaggcgactctgatgctggctgaagtttgagaaccattgcccttggcctgttcctgctcatcctggcttgcaggctttggaggccttcgctgttgattgatttacactcctctccacagaatgggctcaggaaacaaaagattacttgattagctgggaggtgagagaaaaggggctggaactgtgtaggcagccacgcagcttacaaatagattatgttctggactttggaagtcagctgtttggaatagaagctgttttcctaggaatggtagatagctttttatgccagcacataaaggcatatttaattccaaacttggctgaaatactgctgcgtcacaatgaaaatgagcagatcccagtgctcctggagtattagtacctaatcaaagcagaacagaacaagaaatgaaacacggagatggtattttatgtatgttaatattgctgatcaaagaaaaaggttgatttggagacgaattaagaggtaaattgggatatgtcaagattcataaggagtttctggcctttctctagaatatgatgatactcattcatttaggcagactttccttaactgtggttctggattgttacctttcttttttctgaaggcaaatgtcccactaggagggaggtaaagaattctgagaccaactggcatgggttgaaaaggagaacagaaagagtaatggaatcagagagaatgcaggtgtatttattaattaatacgagcctcaacggagacaaaactaacatgagttgtgagcaatgagaggtggatgggcatagaccgaggtcaggattctcctctgtacttggcaagacaggaaagacagcagacctatgtggagcacgtgagctgggagctgctgttctggaaaccttccctcccactgtatttgcctgcccttgtcccttacacagttccatttcatgtcacccgacttctttcctttccctggttactgatagggcaaaagaagatgagctggaccaactccctttttcttcctagagatttgaactaagaaacaaccagatacatttcagtccgtgatgggaagaggtttgcggctggctgtgagcacttcacacattcacaaatcacgcacttctagttggctttcttgtgatggcgaaaatactttctttttggtttcatgatgcatttattaaccattctatttttgtatcatacaaatgatcagagctgacagttgaatggctgggttgggagaagtgtggtagccctaatggaattaattaattgaataatattgcctgacaaatggctccattataccaaagagggcttgagacttaattactgatgtcatttatctctctatttgcaccccaataataagtgactcatttctcattaatattgggtcatcttccaaaaggaagaaaagaggccaaaatatcaggcgggtgggtggggggtgaagcaatgtctttgttccctatctcattattttgataaatcataacagactcccgttaattaggtgggcaggcttaactggctgactcctgtccaacaattacctcagaaaggagcaccactgggaacacgtccttcccttgggacgacatgaaaggaagtctctaacaaaaaaggggatcgttcccttggccacgctgggggcatcacagttgtcaagacacatttctagacgtaagggctggagctgtctcggggacatcgcctgtgcatgacggtgatgtctgtgggcctgatgctgccttcctaatccagggttgagctaatggttctcagtgcctttgagtccccctgggaaatgagaacctaattaagcaggggaacaggtgtaaagagaacctgatttgatctggccacattaattgctgagattgggcttgcatttagctggaaacagtgaattaactacagccggaatacagctaatcccttggtttcgctgcgactgtgtataaaacacactggacctgctggggaacacaaacaaagagggatttgcagtgaaggtaaaaccgcatccttgcatgggaagggctgagaaacgagcttagccacagagggtggccatgtggcccagactgggcggctcattttccctacaaaattaccaatagcactctcttttattctcaaaaaatgttccagtttgggcaataaattaaatggttactttatttcaatgagaattttaagttggtttaaaatatttttttctttaccggaggagtggtattataggttgaggagttaccggttgaattttgtccccctcaacaaagatgttgaagtcctgacccccagtatctgtgaacgtgaccttatttggaattggggtctttgcagatgatccagttaaggtgaggccattaagggtgagccctcatccaggatgactggtggcttttaaaaggggggaattttggacacagtcacagggagggcaccatatgaaggtgaaggcagagtctgcggcaatgtttctataagccaaggaacctgaggattgccagtgacccccagaagttaagggaggggcctggaacagattctcccccagagccctcagaacaaaccctgccaacaccttgatctcagacttctggcctccagaactgttcagcaataaacgtctgttgtttaagccaccctgcctttggcactttgtcacggcggccccagcagactaactcacgtgggcactagtctcgaagcatctgataaggctctaatgactcatggtttgtacggttcacagaactgagccgtcttgatggcgaaggctggtcgcagggttagggagcagagctgattagaggaccagtaccaatttcccacctcctcggtgccaagctctgggaagagggtgacagagatggccctggttcctggcctcaaggggccagcagtccggtgggcaggcagcctgtgcaggtgaccttgtacttcattagctaaacacgagtatgtatctatgtacacacacctggaagggagggaagctcaatataggtggggggcaggcctcccaagctgggctgaaaagcatcagccttcccaggatgggacatctcagctgagacctgagaagaaagggctacctggattttattttattttgttttcttatttttgagacaggatctcattctgttgcccagaggctagagtacaatgatgcagtcacgactcactgtagccttgacctccgtaggctcaagcgatcctcctgtctcagcctcccaggtagctggaaccacaggcacacaccactgtgcccagctaatttttgtattttttgtagagacggggtttcgccatgttgcccaggctggtctcaaactcctgggctcaagggatccacccacctcagcctcccaaaagtgctgagattataggtgcaaggcacaacgctgggctgctacctggattttaaaaaggcaggagaaacggagaacaaatgtgaagttctgaggaccaggagggctggagcttgaaaattccaacccgggagcggagagactggagaaggttgttttccaattcgttttctcagccttcattgctcgtttatcgagcgtgtagagcacactgccatgcaccaggacaaagccaccgcttctgttgggagaactcactcacggcaggagaggaggccccttgaagtgaatggaaaagccttaaatgggagagggataggaggaatggacaatgttcactcctgggtcagaagacaggagctctttggtccctgacctctctggtcaattgtttgcatgtggctaggcgtggagaggtcataggtcacatccaaaagtgctaaattatttctaagtgtataatgagattctctgtccctgaagccgaattttggttgcagcttgtcagagtttcattcatagatatggctggtcaattgagaacattctagagaacacttttgtgatggttccttcctcttgaggttctgagctccatatccttccacctcagaccccacatccaggacctaccatcttgaatttaagtttttgccccttggcccagagtctaaggaaattatgagatccatagacccaatccatacagtgcttttgcttttgaatgccagcgttggcgtttcttgggtgctattttcaaggcggatttctaggttggatgttaaagtcatcgtttctcttctccagttgacttcaatgacctgttgccggtgggcccgggacaaaaagttttgggaaggcaaaactggggtctgatttggtaggcatggcatggattatgtaagtgtacaggtctgcatttcaaaatgaaaaataacaataataattagggtttctctgggctcctcatgtccaagccactcttgcaaaaccacctttggatgagcctgaagtgtcagcaaatcagaaacatgtggatttaatttcctttgaaatacaccagggggagagggagctgtgggacttggcaacctgcttcttcgggtttgccaaaccccaaatatctcacactctgtgagagctctacgctggcccccagcagtctcgtctggccagcccagcctctgcatttcttgctgtaccgtctaggtctcctctaaccatgattcccttctctgggtccatttcagctgccagagggatgctaacaccgcccacgtgctgcagcaggactttggaaggggaaccagcactgtaatgaagtgttgggttggctcaagtcttgtctggaccacaaaccatttttcaaccactagtgtgcctttaaaacccaaaccaactgtgagagtggttttctactttgattctagatgggaaaatattttgcttttttggtggatgacagtgtcaggtcccaaatggatttggtttcatcctccagcacgcatgcatataacgtgaaacatgcccacactctgcaagggccacagccaccccaccattatgttccaaggcaaatatgcgtccgcgggtccccgggaaagtaaaggagtttcacattgaggagccgagccacacagtctagcagttctgatgtctctccaaggcccacagatcctggtctactaacttaagggtaaggttgtataaataaggtccacatcacttgctggttcattatttttcttcgttgatagtaatgcctccttttttcttcctttgtattttctgtgtcttgcagccccttttgtctaaaatagtgatgtacattaaatgcaaagggcaaatggaaccattgaaaagtactttttgcatccaaaacagccaacgctttggtgcctgctatgtgtcagacactgattcttctgtcatccttattctactgatgaggcaactgaggcagcttcagagagttcgagtaacctgcggatcacacaactaggaagtaagagagctggaacttgacgttgggctgttgacctccagaaatggtgttttttccagtactcagtgctgcctctgactccattgtgatggttgattttatgtgtcaacttgactgggcccaggggtacccagatatttggtcaaacattattctgggtgtttctgtgagggcgttttgggtgagattaacatttaaattggtagactgagtaaagcagatggccctctatgatatggccaggcctcatccaatccattgaaagcctgaatggaacaaaaaggccaaccctccctcagtaggaggaaatttcgtctgcttgactgcattcaaactaggacgtcaactttttcctgcctttggacttgaatagaaacatcagctcttcctagatcttcaacctgccaggcttcagattgaagtttataccatcagctctcttggttcttgggcctttggacccagactgtaagtgcaccatccgttctcttgggtcttgcttgctgactcaccctgcagatttggggacttatcagcctctaattctgtgagccaattccttctaatatatctctctatacgcatcctgtctcactggaagaaccctgatacggttaggctttgtgtcctcattcaaatctcatcttgaattgtaaatcccataatccccataatccccatgtgtcaggggagggatcaggtggaggtaattgcatcatgggagcagtttcccctgtgctcttctcacgatagtgaaagagttctcacaagatctgatggttttataaggggctcttccccctttgctctgcacttccccttcctgctgccttgtggccttgtgaagaaggtgtcttgcttcccctttgccctcctccatgattgtaagtttcctgaggcctccccagtcatgcagaactgtgagtcaattaaacctctgtcctttataaattacccagtctcaggcggttctttataccagtgtgagaatggactaatacaaaccctaatacatcaatttcttttttgatctaccaggcaatcctgtgaagtagatgggtcaggtaatatcattgctatttgacagatgagggagaacaagacctagcaaatgaacacgcatgtgttacatgctcacatagtcacacacatgctcgcatgcgtgcgcgtgcacacacacacacacacacatatacatacagaccacgcacttcaggacgaaggtcagaatccaggtctaatcatttaagtaagtgcttcttccccagggtgtccacagagcagccagccatggagggcagtgctaacttacttttaaaatgtccttaatgtccaggatcacgatagcaagtcccccttcatgcagaaaaatctgcctctgagtatctgggtgtgcagaggagctactactattattctgttcctcacattccatactgtaagttccagctacagagaatattgtagcaaagtgctagcaaacctagcacgttcccacctggagacagcgaatccagagagtggatcctcgaggataaaattatcccccaaacgattgcatgttgagtgggacaaggatatctggccagtagaatgtctgtataagagaaggcagaaatctcattatctttgttggctgatgtaaaatccaaggccatgcaatgtgttaagactgctgtcacttatcctaggtgatgactcagtctatttacttgcaagtctttctgttttgcaaagccacccccgcttcaggatttagaagaaatagggttctcccccacctgctctggtcttcacgatatccactctggcaggccagggccatagtcgagctgttaaatattgaagatgtgtcgtcctgattgtatttaagtagtatttcattgaaagtgagtggaagatgggagaagcaatgtttatacatcttcaactgctcttatcaagcagacagaagttcagacggaggtggctgtgaccttttactgctgtttataagcagcagggaaatatattttgggttttggcagccacaagatccctgcataatccaccagtcctcccccgtactcccacctcccacctcaatcatttttgtattgaaatgtctgcagaaaatggatgtggaatggcactattgtcttgggtaagtaagtttttcactcaaggcacaaaacccctgtcatacacctacctctggttctacaggagcctgtgaactcgtgccagaagaggaaaggctgagctgatactgcaaagatgtggcagcagatgggaacttgtgcctgcaagtggggagccttggttttaatgaatgaaatctagcaagttcccatctggagatagtgaatccaggaagaggatcttggattggacaagtggatgggattcagtttggccaaagggccagaaaaaactctcattctttaaatgaaaaccttctcgtctcttccaacctcctagtcttaggacaagatcatttttaaaaggtctagttttgtggcttcacactatgaactagctgttgtgagtcccaaagaagaaaagagcattacttttttcatttaaaaagtgagcttcaaactcactagttctgcctgaagccagaagcttccgatttccaccggcatctctgtaaccggcatctctctaatgggataatgggtagttttcatacttcgaaaagcactgctttttgtctctgccggttgagtaagcttttgcaagcagggttgaacaagaaacaccgttttggatggcaatggttttatttacattatactcacctaggagcttgttttcatggaggggctcaaatgtgctggacaatggactctgaattaaggaggagtgtggagatcattgaaacatttgctctaggggaagaaatcaagcaaagagacctattcattcacattgaccttggagatagatatcaagtaatggggcaattcagggctaattatttcctctggggagagcaggactcccattgggtgtcccattggctgtgggtctctccctcctgcagtctcaggaccaggagtgtcagatgccattccccagtgggctgctacctttgatgcgtgctgacattgtctggtcacattccactccatgagttgtcctcagcagccagccagccctggtgccattggccatgccacagtataacatagacctgactgtttgaaacaggtggctttctacttgggtcccctctgggatattctcagcatgcaaaaggggtttgtttgcacattcagcatacttaggcaggctttagaaatattgacttaagtggaaattgcctcaaaaaatacagataccagctgggcatggtgtctcatgcctgtaatcccagcactttgggaggccgaggtgggaggatcacctgaggtcaggagttcgaaaccagcctggccaacatggtgaaaccccacctccacaaaaataccaaaattagccaggcatgatggcaggtgcctgtaatcccagctactcaggaggctgaggtgggagaatcgcttgaacccaggaggtggggtttgcagtgagccaagactgtgccattgcactccagcctgggtgacagagtgagagtcagtctcaaaaaaatacagagtgagagacagtctcaaaaaaataaaaataagtaaataaaatacagatacctcaccccaccatcagatcaaagaagcagagtcacctggggatgtgacccaggcattggcacttaaaaatcttcccaggtaggtgcatctggtttgaaaacgactgaacacaggaaatgaaagctatttcttagctacgtttgtggggatttcttggtctctgtctctcactgtgggtggtgcatgacatttgtaggtgtggactaaaggccacaggagagtgttcatgcccctgggaggggtttcatggttggtggccctgttgttagggaaacgggcagtgcatgggctaagcccacctggcaggtggacacaaacacacactctcaaaccctcttcccggttgaaaaactctcacatgagtcctgtggttgggcacgcagggtatccaggagccacagaagctgctgtccccatgacctcaacttcgagtctgcgctctaattctttctcacctgtatcctggtttctcattgattaagaagacatttagttgatgccagtgatgttaatgactcatcttatgactcttggggactttctctgccctgtaaataccacatccctcttctaccaaataaatgttattattattattattattattattattattattattattatttttgtagcccatggcccagtctaattatgacaaaaaggtttacaaagagacacactttaaagatagggacatggatgggctcaagacggtaaaggatgtgctgtattctgcaaacccaagcatagaagcatagaagactggaatggctatcttaagatcagacaaatcggacttccaggtatacagcgtgaaccgaaacaattcccacagacatcccctccctgtctctcacccctacaccgtcttggtactaggtgcttcagaccctgcagctgggctgtgtctatgtgatatggcctgcgtccagtggtatggtttggctgtgtccccacccaaatatcttgaattgcagctcccataattcccacttattgtgggagggacctggtgggagataactgaatcatggggacgtttcccccacactgttcttgtagtgaataagtctcacaagatctgacggttttataaggagttttcccttttgcttggctctcgttctctcttgtctgccaccatgtaagacatgcctttcactttctgccataattgtgaggcctccccagccatgtggaactgtgagtccattaaacctctttttctttataaattacccagtctcgagtatgtctgtgtcagcagtgtgaaaatggactaatacagacaggcatcttggtcaggttgcttgggttgggtgccttggttcccactttgggtgttccccagaccctctgagtctccacagctgctcctgatgttgcctggctccggattcttcctcccttccttccccttctcctctcatctcccaggcctttggcataatctcatccaggaatttagtttttaccaaagccaggaagaatcttttcagccagctgaaatccctaaggtcaggaagtgtgaagctgggccactagccaggatttgatgtgggtgagaataaagagaactgaacccagattagtattttaacagagggtcctataaggccttgagagcgtgacactttccccaggtgcccaccatcagggatcattgtttctgcctcctgggctcctccaggctctcacctctgtctaggtcatcgctttggaggtactgggctttcttggcccctccccaaactttaacccatttaaggcagccgtcactttttgcagggcctccaagctcactcagaaatcttgtgttgaatggtgcagagctaagttgttcactctgcagtatcatattagaagagatttggtttaccctgaatccactctgacgatgtttgttcgtttgaccttcaggtgtgcaagttggttgtcttcagggaagagagcagttctcactcaacaatcagacataactctgtcttataacaaaattgcacccatggagcgtctaggaactccctacccaaagtgtggtctgtgggccagcagcacctgcgtcatctgggaacttgtaagaaatgggattcttagcagatcccagaccctgctgcatcagaacctgcattttaatgagatcccaggtgatttgtgtacctgtgaaaatgtaagaagccccactccagggcatacacatcccactgataggaatggaatcaggactattacatattttggaaatatttttaaacaattaagaaaaaagtgataaaaaatttccttattaaattagcaaagatccaaaatgaaagattatcccaatatttttgttaaatagatactttttttgttagacactgctggtgggaatataaatacaatgtttcttagtataatgtttctaaagggcaaattgttagagaagtctgagaacaaatgctctgccttttttaagaattgacagataaaatggtatgtatttttcatgtacaacatgatgttttaaagtatttgcacattgtggaatggttaaatttagccagttacctcacagaggtttttttgtgtgtgaaaacacttaatatccactttctttgcatttttcaagaatacagtatattgtcacgaactgtaatccccatgctgcaggacagagctcttgaacttattcctcctatgtaattgcaattacatatcctttgaccaacagctctttagaggagcaatttcctttctgtgacttgatcttaaggaaaaaattaacttgtgatgtagctccaaggatatggggaaaaggattttcatgacaaaggtttatttgtttttctaatcttttcttcttccttactaacagaaccccaggtttgtggcgggacgggggcaatgcaatccacatgttctgggcgctttgcaggtaagggtggccaatgagatgtaagcagaagtcactgggagataccaggcaggaaaacgctttctcaggggaatccactcagttacgagcatcctctgacctataattccgcacccctctccccctttgtcctgctctggagtcccagtggcctgttggagatgaccattacccaacaaccgatgtcaatgcagcctccttccagactttttattttatatatatttaaaaaaatctaatttgtccaagtcagtctttcaggagtttgatatttgcaggtgagcacaactccttacttgcacacaacctatatatccaaaaataggggcttgacgaatacattgtcatttatccacacaatgaaatgctatacagcattaaaaaatcatgcagaactgtggtttcaaattatttctagtaaaggacacctccactttttcataatcagtctttctagaatcccagtgtacagaactgtttagaagtagagctctcccactttgggaggctgaggcaggcggatcacttgaggttgggagttccggaccagcctggccaacatggtgaaacccggtctctactaaaaatgcaaaaacaagctgggtgtggtggcaggcacctgtggtcccgctgctctggaggctgaggcataagagtagcttgaacccaagaggcggaggttgcagagagcagggattgcagcactgcactacagcctggtgacagagcaagactgtgtctcaaaaaagaaaaaaaaaaaagaaaggatattaaagtcattaaggtccctgaaaatggctataacaacaacaaaaaaaatgtgacttacaaaaagaaacctacagacttgtcaaccaaatgtaacgtgtgaactctggatcctactctgtatattgaccaaatatctgacgatttgaagaactctttgggaattttattttattttctaaatttgtttgttactggggcttgtttctccaagaatttttttttgtaacttaaataaaaaataaaataaagtaatgctcttctaggttgacttgggagtagggacttatcatctcttccttccatctgcaaaatgtcctctcccctctgtaggggccctgaaataccttcacaggtctccagaatttggtaaaactatagaacacagtttgaaatgcattattatataattatctcttaatctacagggagaaaaaaagctcatgagatcttaagcaaacagcttactagttgaattatgatacgatccgattttatgtttaagaatatatatatatatagaaatattaattttcccaggcttcaacactctttgggaaaaatgaagttacattcatcgtcattactcaaattcccctggttggtggactccatttgcagaacagcagcactttcttcctctgtctctctagttattcctgaagggccttaggggtgtttcccatgtgtcaggagcatgaaccctcaaattctttccctggcttcatggttcctatggcctactgaggtgtctgaggacaatccagtccctgctggtgccctggaaggggacaccatccggccagcattcccacctgtcccgcatatgcctcggtcctgcaaggggtcaggccatgccactttctgcgaagaaccaggaggataaacaatatttcatggggctgagctgtagctcagggacagcctgggtaccagaggccatgccagtagtcatgctttcttccttgttgctagtcctgtctggctctatgcatccatgcacctagcttcaacctcccagactttctccaccttcaccttcaaacgagctgctgtgggaggcgggggtcccctcccccatcctgtgtgtgtatgtgtatatgtaaattggaacttaaaaatttaatagtagtttctgaatggcaagattgggatgcttaaatttttcctatttttttttcctgcataattgtaattttaaaaatttctacaataaacatgtatcacttgtattttttaaaaatagaggctgatatgggataattgcttgaagccaggagttcagcaagaccagcctaagcaacataatgagacacccccgcaacttctctaaaaattttttaagattagccaagcatggtggtacgtgtctgtagttccagctattcaagaggctcaggtgggaggatcacttgagctcaggagtggactcagtgactgctatgactgtgccactgcactccagcccaggtaacagaaaaaatgaagtcaccccatctctggaaaaaaaaattgggatgcacctgaaatcagttctgactctgatctctgaatcttaatccatttaactgcgagtttcctgccatccaacttaaagtattttccctgtgtcagtgttggaggggtggaagtgggagtgggcagaggacagtgtatgtgtgtgtgttgagaggaggaggaaatactatagacattgaaaaatcacgtagaactatagcttcaaagtatttctagtagaggacacctttccttttttgtattgtccttcatagaataccagtatttacctactgtgaacagctaataagatgtgtgtatggaagactgaagacagtctgaagatgcatctcaacaaggcctaagtctcccttcctctgggactgtccggagtgctagttcactgggctccttgctctgaggctggtgggaactggatttcaggacacaggctgaccacacagggagctgtaccgcagcccttccaactgggactcccctcggttctcacactgtggcagtagtgggttgggaggctccaggcacggggagggtagtaggatgatgaggatggtggttgatatgacaaaggacgagtatgggtttcaccacagaaaaccacacaatgtcctaattcctattaacttctgcaccttgcaggcctttctttagctgctaaaaggctgtcggtctttgctgatttgcagaaaggtgcacgctcatgatgaggttttcaattcaggtgggaactagacgagcaggtaagggccgcctgcacggagggtccttgtctctgtggagtttacggcattcgtggttttcctcggaaggagctgcttgtgtggtgaattctgctttgagaactggactttccaagtgctcccatggcaggggacaacatttcagagctcccttttcactgttacaacaaaagaaggctcttcctgtgtccggtgagacccctgaaatacgagtcatccccactcctgacccactcccaatacctaccagctgctccttgctttagttttagaatatcccttttgaccttctctctccctttttgtcactgtcgtttgaccctgagtttcccctgcccacatcctgcctacagtgcttcatgttgctttaaatgacttcacagccccttgctcctttaagtgatctaagctgagctgggttagcagggccactttctgtgtagcaaggggacgtctaaaggctgcagcccagcttggttagctgctctaaggggactccagtcttcctcaccccaccaggtgccccaaagagcaaaaccaatgtttcttttcatccatcaccttttcctcaacaacaccagctaacatttgttaagcacttactctctttctggcccatgtgtttatgagcctaatcctgactgcagccctgtgtggtaggtgcttcagtaagccccatttgttagataagaaaattgactcctggccgaggtgccccatatggaaggtggtagagctggggcagattccagcccaggcgcctggctcttggcatgagcagcctaccatagcaccagttctgtggttcttccctctgagaagcctgtattgaattgcttttctttaagttgtattttgtgtttagttgaagtgcccaatcctcccattcagttttcaggggaggcaggtgtggtggtggtgcacacctgtagccctagctactctggaggctgacgtgggaggattgcttgagcctagtgagccgtgattgcagctctgcactgcactgcactggcggggtcgcagcaagatcctgtctccaaaaaaaaaaaaaaaaaagttttaagtggttttcatggtgcctcaaggctcttctgcctgtaggactgactgctgtgcagggctctggccctggagtttagattaacagcaggaagcctcttgtttacatggatccacatggctgcagcttcctagccaagggacctcaggacagtacaaggttctgttcctggttgacgctccagttggtgctgggtgggcctcaggttgcctcagttttagctgtatgtttgaaaaagtgatgccctaatgatccactctagaaataaggcagagagaatcaggaaatagggtttttaagttgctcaaacatcgctccatagattatcacatttactccttgggcaggttttttctttattttatttatttatttattttgagacagagtgtcgctctgtctcccgggctggagtgcagtggtgccatctcggctcactgcaacctccgcctcccaggttcaagtgattctcctgcctcagcctccccagtagctgggattacaggcgcacgccaccacgccaggctgggcaggtatttttattattagccccgttaaaaagttttttatcgagatgaaattcacataacataaaagtaaccattttaaagcatgcacaatccagtggcacttagtaccttcacagtgtcatgcagccagctcctctatctggttctaaaacattttcatcacccccagaggaaaccccatgcccattaagcagtgacttcctattctccctgcccccagcccctggcaaccaccagctgtgttttgtctctgtggatttacgtgttctggatatgtcacgtaaatggaatcacaatatttcatcacatattgtgtgtggccttttgtgtctgtttttatcacttagcatgttttccagattcatccatgttgtagcaagtgtcgtaatttccttccttttttatggttgggtaatattgcattttcttcattcgttgatggacacttggattgtttccacttttggctcttgtgaataattctgccttgaacatttgtgcacaagtatcgttttgggtacttgttcttaattcttttgggtatatgactaggagtggaattgctggctcatagggtaattctccatttaccttttgaggatttattagcctctttttaaaagtgaggagtctgaggctcaaaaaaaattataagttgtctaaagtcacaggagaagtatatgacgggcctggcgtggtggctcatgcctgtcatcccagcactttgagaggccgaggcaggtggatcacctgaggtcaggaattcgagatcagcctggccaacatggtgaaacatcatctctacaaaaatacaaaaattagccaggcatggtggtgaaggcttgtagtcccagctactcaggaggctgaggcatgagaatcgcttgacctcaggaggtggaggttgcagtgagctgagatggtgccactgcactccagcctgggcaacagaacaagactccatccccccccaaaaaaaaaaaaaaaaaaaaaaagaggaagaagaagtatatgacccagccaggatgaggaactggagttcatactaccttcattcaagggccctgactgccgggaacagcgttcattcactcatcaaacatcttgtgagggccagggctgcctttgtggcagatttaaccatagctttcagaaaggagcttcctaatgcagtcactccaggagcaaataaaacaaggggctattttaaatcaaaaatcaacacgactggctcacacataaattccattaagccaacactctatttgaacacgctgctgagccaggcgtcttgtcttgctgcatcttttaacttgaaggtgggcatttcagcctgcacaataaggtccactccccttagttctaatttcctgccaccttctgcatttcttgttcgaccctgggggtgggggagtactgacttggtcctgaatcactgtcgcgattgggatctgtgaaagtcactgcagaaagataatttaaggggttaaatgtcagggacaggagagagtaaggtcctggttttagttccggcttaactgggggatgagggagattaagaggaggtgagggagggggcagggtttagcttgataatcttattttgcagtggtttctggggggattttacgatgaagaggtaaattctaaggtttgctgtcgactgtttccagctccctggcgcactttccgtgcagcgaggggacgtccaaaggctgcagcagagctgggttagaaaacaggctcccacccgccctctactcccctccctggccccgctgacctgattaatcagagccctgcaaagcccactgaggagggctcctggctaatctcatctccgcacccacgcggggacagacacctccgctcggccaatgagacgcaattctgcaaactcggctgagcggtggaaaattccatgctctcggcgctgccctcggtggcggccctggcgggatcgcgcgctcggaatgccgcagcccggccgccgagtggccaccagctggggaagagctgagcgaaaccgccccggggtccaggcgttttgccacgagtcgccgtgcgacaagttggggtctcccttgttctcccacctctctgcaccaaaagctcttgaagcaaattaaagaaagcaggcgatgcttgtatcattgcggagtggggaatggagctgggggacaaatggtgacattctccctccctccgtgtgtgtgtgtgtgtgtgtgtgtgtgtgtgtgtgtgtgtgtgtgagagagagagagagagaaagaggccacagtcctccacccccacgcttgcccacccaagttataaatcctgcctgtaattgtccccctgcctccaccaggctttcaacccagaaatcgtgggggagaatgaaggaggcacctttctagatcaatccacctatgaactatggtgcccttttagaagtggccggtgggtcctagagagcaaagggtgatgagttcgcaaaggtggacgaaggagaccaagaccagcagtcaaaaccaatggagcaagaccggtgccatgattcagagacgcacagaaaattccagggccaccgagaagggacacgttgcgcattctgccagcgcaggggaggaggggatggaggcgagatggaggacaggactttgccagccagggaagggggaggcgccccgagcctgcgttccagtccccggagctggggccgcagcttttccgcgaggttggtctgtgttaggaaatcctatctttcttaactctgtgtgaattatggcaatacctccctgttatttcagaggatccaggcctgtttctgctccttgcaaatgtgaaagaccctggtgaacgcagtccaaaaatttagaatgcgacctggtgcacagcgctcagctcgaggagacttacaatggtttcttctgccatctgcatcgggcaggggtggggaactgtgggccccaagctatctgggaggagggaagagaaagaaagggggaaatacaggttcttgaaacaaagtaggaagcttcagcaagaatccacggagaagccctgaggttgagtctaaagccctgaggtttagtaaacaaagcccagcacatgggacctgaaacctggatgccccggttctgctagtgaccagttgaaggtcctggggaaatctcacccttcagagtcttagttttcgcctctgtaaaatcaaggtcataaccatttctgccccatctaatcgagtaaggtctttagtgagacccaaataaaataaaactacgtctatgaaacagtaaagaagtatagggaactgtttttcatccatgtgcacaagcaatgtaaaatctatgttgttttaattcgattaacttcaagaaagagccccagctaaattaatcaatcaatacatatattaatatattcagtaaatatttgttgagcacctactcaaggccctggagggccttgttgaaccctccaggccctgttctgtgcctggagggatacacagctgaacaaaacacaaaaagctctgctcttagaaagcttagattggaggagaccggtgataaaataaataggaaaaatcttttttttttttttcctgtttaggcagtggtaagtgatatagagaaaaagaaagcaggaaagggggatggggaaatgcggggtgagagtgctttagaatagggtgatgaggaggcctcatggagaagatactctttgagcagagacctgacagggagatgggggggtgagctccatggatttctaggggaagaacattctagaagtgggcagccagcaagtgcagtgggtctgaggggagacggtggcctttcctgttggaggaacaggaaggccggcactgtccttggaggggtatgagtgccagggtcagaggctgatgggggggcaggtccggatagagtttgtagggccttgaaggtgacctgaagggccgacttttgcagtgagtgttcctgacagctgggggggggcacgactgaagctctgccttgggtcttacctggccgtaaggcaactccatttttagcttggatcctggcaggcaaccaacaagcatttattgcagggctggctgtgtgttctcggctgcgctgggagctctgtgaatatccggagatataacagggatccttagctttggggaggccacagacttgctgtgaatagaatttagctgcaaaaggcagttagtgaccaatgcaagactattcgtgtcactcgctgcattgtgtggagggcctagaagcatgagggaggctggggttttgggaaccccaggggcaaccgggactatgctgggatcatggtaggtgctttacttgtttgcgaacagactgagtgattctgagttgcatactcagggagctctttgtggctaattaagtccttttcctacccaggcccaggtggccagcagcccctggcagccgcgcacatgctgctcagtgttgccagcgcacagcaggggctgctgcagatggtcctccagccacagggtgataaaaggcctcctgaagaagtaaatgaccctgctggttgctgtgtggaatgtttcccccagggaaattaaaaaatggaatccagtgtccaggcctcagtctcatgtctttaataggctagtcaagatcctggggccagggcctgggggcagcttcttcctgctggagaggccagtttcctttcccagtctctgacccttctcggttttggaatcctgcttgagacctctcaactctcaccaggcgaggagggtgatctggggtagagaaatgacatgaagtcatttcagaaaatcccacaatgcctcatcacccagaatcctttgcggagctggctggccggccctgggctccctttcagctgctctagaatgtagcaatggtgggctcctttgggggccatctagaagcaccctgcccctgggcacctgcctcctcactggaggagaccagaggccacgtcccagccctgtgcttccagctctggaactgcccttgacttcactggacaggcctgagcaagtcgtgtaaccttcagggactcagctatgcccactccaggctctgtgaaaccaagacaacctcacgtgctcagttcctcagctctgcaggagccaggctgctctggggtaaggaaagggagagagagggatattgtcctatgcttccttcacatagctgaacgttttatttatttaactttttggataagtaatgcattttatggttaaaaaaatcaacaagtataagacattacacagtgaaaagtgtcctttcccatctgctcaattcttttctttctttctttttttttttttgagacggaggctcagtctgtcactcaggttggagtgcagtggcataatcctggctcactgcaacttctgcctcccaggttccagcaattctcttgcctcagcctcccaagtagctgggattacaggcacctgccaccatgcccgcctaatttttgtctttttggtagagacggggtttcaccatactggccaggctggtcttgaactcctgacctcaggtaatccacccacctcagcctcccaaagtgctgggatttcaggcatgagccactgtgcccggcccccatctgcccaattcttatcccccaccctaaaggcatagccactgttattaatttgttgtttatccttctagagttttgtgggatttttgcacatacaagcacatggaatatgttcttcccccactcccaactctttttctacttgattgctaatacacagtacagtgttccttacctcactgttttcagttgacagtgcatcttagagatcttttcatcatagtacataaaccatttcctcatttttctttactagtgcttcttgctgtctaaaatatgcccaaacaatcccctagaaatggacatttaagttgtctgcagtattttgctttcaaacaatgctgctgtggacaactgcaattcttcgttcagcacacaattatgtttatgcataaggtaaattcctagaagtgaaactgctgagtcaaagggtaaatgcatctctaatgtggacagatgttgccaaattagcctttacagggggtatgccaatttatgctctcagcagcaatgtatcagagagagtgcctatgtttcaaagcttaccaacagacttggcttttaaacttttggatttttgccattcgataaatttgaaaaaaccagtatggttttaatttgtatgtttctcattgtgagctctccatatccatgcccacttttctattggtttgtttgccttttgactcatcaatttgcagaagcttattatatactagggaaattaatcctttgtgatgtgagttacacatcttcctcattttgtcatttgttactgattttgcttagggtgttttttttttctttttcaattgctttttgccatgcaaaagcttttggttttcatgcagttgaaattattcaccatttatttcgtggcttctagattttgagttgtagttagcaaggccttcctcatgctcccatttttgttttagtattatgttttttctttttacatttaaatctttgacccagtcagaatttattctactataaatgtgaagcccatattcaaaatccaaaagtggtggttatcaacaccatttattgaataatctgtcttttccccatgtagttgagtgccatcttaatcctaaacaaaatcattgcatgatttggatgttttccagggtttcaattctgtgctatatgtccgtctaataagtaatatgccactactatgttttaattgttgaagattttaaatatattttaatatatagtataacttcctcatttattttatcagaaatagctggtctattcttatttttccatgtaaaatttagaatcactttgtatagataaaaacttcttttactgggataacagttatatgttaacatttataagttaagggaaattgacatccctacgaagctaagtcttcctaagaacatgatggggatttttatttttcaagtctttttgttgttgttctgagtgtttaaaagatttcttaatgtcagtttccatgtttcttttaaacttatttttaaatattttatctttgttagtgctttcgtaaatgaagtcttttctcccattatattgtctaactgaatttgtttctaacatataaacaaaagctattgatttctattaattttacatatcctgctctcctattgaattttcttcatgattccatagttgttttcacttatttatcttgttttttcaaagcataagccaaatcgcctgcaaatagtgatagttttacctccttctatccattttttatatttttgattttgttctctttctaattgtgttggctaatatctcaagtacaaaattaaataacaacatgatagtgagaaaatgcttgtctcattcctgacttaagggtaaaagcttttagtatttcttgattaagcatactttttgtttttgagtttaagacacacacacacacacacacacacacacacacacacacacacacgcaatatttaggggttcctatgttattgaccatggaaaatcgagaatggatttttacattttgttgagttctgtttgcacatacacagaggtgattacataattttctccttagaattattattatttgaattggattttttcacgctgaaccatctttccattcctggaataaggcccattttgtcaaggtgaacattattgtttcacttgctgatgaattctgttggctgatatatttgctaacattttatttataaaagtgcacaaatctttagtttacataaagtatagagatacgtagtgtacaaatatatgaatttatacatatacatgcatatgtttatgtatgcaatatatacataagaatttgaatataaaaaatataataaaaagctaatagatgagaaaaatagaatagaaaaatacatgatcaatcctgaaaaaggcagaaaacgagaaacaaaggagtagaaaagatgaaataaatagaaaataaataccaacatggtaggacttaatgcacttataccagtaactaaatataaatacaaaacactccaattaaaagaaaagcttgttggattaaatgaaaagtgttgagacccatgtgtatactgtttacagtgaatacatactaaatagaaggacaaagttaggatgaaaataaaagaatgaaaaatgttgtaccaagcaatattgacccaaacaaattttgtgtggctatgttaatatcagaaaaccgtacattaggggaagaaatattactagagagaaaaagagatgctttgttataataaagtgatcaatttgacaagaatatctaagaattgaaacttatatgcatctaataacatcattcaaaatataaatcaacaaaatgaaaggaagaaagaataaagcatcagtcatggttgaggattaatcgtgtatttttctattctatgttcttatctattagctttttagttatactttgtgtgattgccctaaagatttcattatgtatgcttgacttattactttctaccttaagttacttttacttcttaattaataataatgcaataaccttatgacaggttaagtccattactccctcccacacatggtgaccccacccaaatctcatgttgaattgtaatccccagtgttgaaggtgagacctggtgggaggtgattggatcatgagggcagagttctcatgaatggtttagcactgtccccccttggtactgtatagtgagtgagttctcaccagatttggttgtgtaaaagtgtgtgataccttcaccctctctctctcttcctcctgctttgatcatgtaagacgtgtctgcttccccttcactttctgccatgactgtaagtttcctgcggtctccccagaagctgatgctgtcacacttcccatgcagcctgcagaaccatgagccaattaaacctcttttctttataaattacccagtctctggtatttctttaaagcagttcgagaacagactgatgtacttggggtattgtataattttaacttgacatgtgtcataaagctcataagacattattatcttttttgcttcagacagaaaatatttttaaatcttttcctacatgtttattcttttcagtgctgtgtgttccttcctcaagttctgtgcttctatctggaaacatttttcttcagcttgaaaaaaattgttctgtagtatttcatgtagtgcttctccactgaggatgagttttctcagcttttccccccctgcatttatttttattttgccttcagatctaaagaacctttagctacatatagcatcctaacttgatattttactttaacactttaaagatataattccattgtcttctggctttcatgctttctgttgaaaaagtcaaccatcagtgttaactattgctctcttcaagttaatatacttttttttttttttgagacaaggtcttcctctgtcacccaggctggagagcagtggtgtaatcatggctcactacagcctcaacctcctgggctcaagcagtcttctcacctcagactcctgagtagccaggaccacaggctcattaaaaaaagggtttttttgtgtgtgtgtaagtggggtctttctatgttgctgtattggtctgttcacatgctgctaataaagacataccagagactgggtaatttataaaggaaagaggtttaattgactcatacttccacatggctggggaggcctcacaatcatggcagaagccgaatgaggagcaaaagcacatcttacatggcagcaggcaagaggggttgtgcaggagacctcccatttataaaatcatcagatctcatgagacttattcactaccatgaaaatagtatgggggaaactgcccccatgattcaattatctccacctggccctgcccttgacatatggggattattacaattcaaggtgagatttgggtggggacacagccaaactgtatcagttgcccaggctggtcttgaattctgggcttaggcaatccttccaccttggcttcccaaaggctgggattacagacgtatgccactgtgcctgggctacttttttttttctagctgcctttgaggttttcttattcatctttggtcttcagctgtttaactcagatatgtcttggtgtgattttctttttatttaccttccctgtggatcactgagactctggatcaatgggttgacatctttcatcagtgtgttggaaagttcttggctattatctcttcaaatattgccgtgcccttacctctctattctctctttcttgactccatttaggcatttattagatcttttgactgtgtcccaaatttcacttatgttttattttgttatttccattcatttttctctctgtgttttatattgttttttggtttactaatcctgtcttttgctttgtatagttttctttcaaagccaacaagttcttaatttcagccattgtatttttagttgtggaatgtccacttgagtatattctaattgttacattcatggattataattgttttctttaacacatttttcatatatatatatatttttgagatggagtttcgctcttgtcacccaggctgagtgcaatggcgttatctcgacacactgcaacctccgcttcccaggttcaagcaattctcctgcctcagcctcctgagtagctgggactacaagcgcctgccaccatgcccggctagtttttgtatttttagtggagatggggttttaccctgttggccaggctggtctcaatctcctgacctcaggtgatctgcccacctaccttggcctcccagagtgttgggattacaggcatgagccaccatgcctgactcatttttcatattttttcagaatcataaagtctgcagatgatatctctaccactgagggttgccttttccttcttttaggcagataagatgaaaagaggattgtttcaatccaatcagggactgggtgggcttgaggctggattctactttagtagatgattttcacccctgatttgcctggaaagtcctgtcttttggaggttttgagctaaacgatcatcccaagaaagttaaaatttggcaaatgtcttgaggggaagactggccatgtattttgcaggcttctccctctgatgagagttcgtttcctaaacacctacaagactgaagaatatttcactctgcctttctgaccctgttcccctcgggacaccccagaacttagcaaatgtctcatgggaaaaaattgctttgtattttgggctcttgtaatttctaatccattgcactagctgaaagctttgctggcttctcttcccatgtagagttcctctgtttgaggcaggctgattattagctcacattcagctcatctaggatgagctcttcctcttctggaatttttctttacctagtccttgttgtttccgtgattctctactgtctttagagtatgattatttctcatttacctggttgttattacagattgttgatctttctgacctacggtattccacaagtatgtagagtacaagaaggccaagtatcctgtttatcagtcttttatatttagtatttgttgttgttggttcgtttgtttgttgcttcagtatccataagtgaaattaatttatgaatttttgtgtgcagtcgttgttaggctttctattgcggttatttcagaaagagcatttgaacatttttctcttaaaaatgctctggcacagtttaaataccattggacctactgctctttaatgagaaatgaacttggtttggagcttttattggcggagggtggcagggagaatcttttgggaaaatttctttgtttctctatgggtattagtttattagatcttctcattcttctagtgtgttttaacaagttatattttcttttacggcattgtacaatataagttgtacagtgcatatttatattatacaatataaatataaagctatatataggcagaggcaacataagttgcctatataaacagaggcaacttataataaagccattgtaaatggaaaatatcataagtcaaaatgagtttaacattacctgacctactgaacattataacagcacagcctaccttaaacttgctcagaacactaacattagcctacagttgtgtaaaatcatctaatacaaaggctattttataataaagtgttaaatattttatgtaatttattgaatactctcctgaaagtgaaaaacaggatggttgtatgggtatacttgaagcattttatctaccgaatgtgtattgctttcacaccattgtaagttaaggaccatctgtataatttcacatttttctggtagccatattttaaaagtttttaaaaagcagatgaaattattttaaataatattttattgaaccaaatgtatctaacatattataatttcaacatgtaatcaattgaaatttttaatgaaaaactcttttttgctttattaaatcttcgaaatttagtggcattttgtgcttacaacacatctcagtttatactaattccattttaagtgttcaattttcacatttggctagtggctactgtattgaacagctcaattctgggacattgtcctttttatccatatatttgaagatttatttttattatgttgaaaaaagtaattctgtataatttatttaatttccatgatttctctggttgtttgaatttatttaatctcattttatatatttactttcttccttcttcttgattttgttagccagaagtttatatattgcattgttattttgtttttcaatgaaacagctgttgcattatttatcagttaggtctatagtcttctattttataatttctttttttttttttttttttagtttcactctgtcgcctaggctggagtgcagtggcatgatctcactgcaacctctgcctctccagttcaagcagttcttgtgcctcagcctccaagtagctgtgactacaggtgcatgccaccatgcctggctaattttttgtatttttttaagtaaaaatggggttttgctatgttagcccggctggtggcaaactcctggcctcaagcgatccacctgccttggcctcctgaagtactgagattacaggcgtgagccactatgcccattctggtttataatcatcctattctaactttttcatagttaacttattcattcagccatcctatccttcggttcatgtggttgcttttttctgacttatttattatgttgtttcattcactttttaaatttttttatgcttattaatacagttaaataaggctctgcattttcaccaagtactgctttagctgtatggctataggtactgatggcagtgtcttccttattaccatcttctgttattttgtgttaatgtttgcatttttttctttgactcaagaattgtttaaaagagtacttaaaattattcacatagtaattgctttttgcttttttaatttctgatgttatttctacattgtcattaaagaaatttttttgttctatttttgtttttcgaaaattttgaggttttgtggtcacttgacaatatggtctcttgtttttttttttccttatttattatgtaacttagttctccttcaaccttgttaatgttttcacacttgcgttgttcagctttaatgtctatctctctttgcctgtggtattctgtagtttcctatgatgtatttcagcatgtagttatttgaattatccttcttatgttttggtatactttttaaactgaggcttcatatcttacttcaatattcaagagttctcagtcattacctctttgaatattgcccaattccttcttttctgtattggacctcctcttagacatatgttggttcttctcatttaaatgttcatgtttcttctctctcatattttccatgtctttattttttgaggcatgttgggtaagtttgtctaaccttccagtttctttttgttgttgttgttggagagagagtcttgcttagttgcccaggctggagtgcagtggctcaatctcagttcactgtaatctctgcctcctgggttcaagtgattcttgtgtctcagcctccctaatagctggaattacaggcacataccaccaagcccagttaatttttgtatttttagtagagatggggttttgccatattggctaggctggtctcaaactcttgaccataagcaatcctcttgcctcggcctcacaaaatgctgagattgcaggtatgagccactgcatccagccatcttccagtttcctaatactgtcctcatttatggcagatatcctattcagtacctcaattgtactttcttatagaaaatatatgtgtgttctctctcagacttctgtttggtcctttgataatatgcctgttttattttcattctgtttacgtttctccctttatctgtttaaacttttttttttttttttgagatggagtctcactctgccactcaggctggaatgcaatggcacaatctcggctcactgcaacctctgcctcctggattcaagtgattgtcttgcctcagcctcccgagtagctgggattacaggcgtctgccaccatgcatggctaatttttgtatttttagtagagacggggtttcactatgttggccaggctggtctcgaactcctgacctcatgatccacctgcctccacctcccatagtgctgggattacaggcgtgagccactgtgcccggcctttgtttaaacatattaaaaatcttcctttatcaatttaaacatattaaatttcttcctttatctatttaaacatattaaaacatgttaaatttaaacatattgtcctattatctttggttcttgatatgcaattattcctatttattggatctgtggattttccctcatggtgattcatttcctcaaatagtttgttatttctgcttatctttagtgtggctcatatttttatggtaaggccctattccctgggtttggggatcacctctacagaattggtttgcatttttctctaacgtggtccttgtggatttcttgagttctgaactactttttacattgatttgtggcttgaggccatcgtgctaggcaggtagtggtaagtcactatcctaacagccctggcctggattctgatttctagtatttttctctttttcttccccaagttgcaagtggatggcaagcttccttgtgacttctcatcctggtgagtagaatttttcttatccatgtttcttattttaagttagaagcagcagtttatgaaacctaaaatcctatgaattttagctctttggcacagcacttcctgtgcacacactagattctgcccaggctcgtttctcatgtgggcattaaatctgcacctcccagcctatgtcaagtcccacttttccatacgtccctcgtcttgagctcctatcatcactttcacttttcacgccttggaggctatgaatacatttttttcttgttaagttttatccagaattttaatgtgtgaaacaggattgagggatttaccaacataatgtccagacatccataagtgagatttgaagagaacatttttttttacaataaattaaatatgactctattattgagtaaaaatttgaaatttgccttaatttttaagatagtctgaacactaaagaaattttgtttgcgacagagatttgggccaattgccttcatcccctgaggttacatgtttgttctattttgtcatcgggggtacttctgtggaaagtttgagaggccttgccctgaggtgaccttgactgctaggatggaagtcattccgtgggcaaatcccctgacacgtaaattacccactcgctagctcactgggctgtagctgttgttttgcctaggcttgggctaaaacgtcaggaagcagatttttaaaaattattgttactcatgacaaaaagcttaaacactacaaaaggctgtaaagtggaaagaaaaagagccctaagcagtctccctagtctccccctcctattcccataagtcctcactgctaacagcttctcacaaacctttccagaaatgttatatttgtagatacagatttcttctttttttaaaaaaaaccaaatgaaatcatagtatacatgttctgcagattgaaaaaaattcatcaatgcattttggatatttttccgtatcagcacatgtagccttccctcgtgttttcagcagctgtagtggatttcctgtgcattaatagatgtagggtttctttcccatatgtgtgctatttacaaaaacaatttagggagcatacttgtgcagacatctttttgttaagtgtgtgagcagatttgtaggttaaatgctgggctgaaggtatgcgcctttgagcttttgatggacaagtttgaagtgctttccaaaaaaagctgcagcaatttgcactcccagaaacagtagaagacccacccagtgagcaggactaaggagcctccagatttgtcctttctgcctgcctggcatcctcaaagcatgcagggatgttgctgtctgacacgcttcctcccgaagctgaactggctgtcaagaacaaaaatctggttattgatatcaagatcagatgctgcttgattttgagggatatggttgcttgagtggctttggtattccaaatagagattagggatgggccagatgctggttggggggcataggggacagtggatgaaaaagcaatctattcatggattcaccaaactctttatttcttaacaagtattattgttttttgataagtaagacattttcactgttaaaaaagggggaaatatgaaaacacacaaagtagttaataaagctactgatacgtgggtaattaaataatgctaattaaataaaactactttgtatgtggggtaactgataccccagacagttaataaaaataattccaatgctgagatgaacactgtgtttggtcatttctctgagccacttcccaactatcctaattccccagctacccagtctctctccaggacttcccagaccttcttatggttcagaaactaataggtcaacacccagtacagcaaaatatggccttttgtttttttcttttgggtgcatatgcatatgtgtacaccctacacataggaatgatagaatatttaacagctggttccgcatgggcacgaccaacggggtggacaggagtctgggaggctggcttttgctgtactgggtgttgacccattaggttctagaccatgggaaggtctgggaagtcctgggttgtgggggagttaggaggactggggagtggcttgggaagtgactatttatcatttattatgaaatgtttttaatattttattttattttttttgagacagggtttcactcttgttgcccaggctggagtgcaatagcccgatctcagctcactgcaacctccgcctcccgggttcaagcaattctgcctcagcctcctgagtcactgggattacaggcatgtgccaccatgcctggctaatttaatatttttagtagagatggggtttctccatgttggtcaggctggtctcgaactactgacctcaggtgatctgcccaccttggcctcccaaagtgctgggattacaggcatgaaccaccgcacccagccctgtttttaatattttagcaccctctgtgtccatactggtgcatactgccctctaagtgtgcattccagtttgtgtacttttaaatataattaaaaccatacattgcaccaactatttgctgcttacaagagatatgctttaatgataaggatacagaaagtttggaagtaaagctagaaagatacaccatgcaaatagttaccaaaatttatactgatcttaatgatttgtaactcttttaacttaccattgtccctatggtaaaacattcttctgtgttgttgcatattatgttatggaatgcatgtatcatcattcatttagctaatgaaaatattattagacattttagtaatttctagcattttatttatttatttattttgagacggagtctcactctgtcgcccaggctggagtacagtggtgtgatctcggctcgctgcaacctctgcctcctgggttcaagtgattctcctgcctcagcctcctgagtagctgcgattacaggtgccaccaccatgaccagtgaatttttgtatttttagtagagacggggtttcactatgttggccaggctggtctcaaactcctgacctcaggtgatccgcctgcctcggcctcccaaagtgttgggattacaggtatgagtcaccacacctgccctaatttctaactttttaatataaaaaataacactaggttgaataattttgagtgtatagtaccacctcaggtaattcttcatttctttcctcaggatacatttttggctatagaaccatgactttaaagtttatgtacattttaaagtctttttgctctattttgctaaaatgacctctagaaagtttgcatggatttctagtgccattagcagcacgtaacagtcccagtgccacctcccgtctctgcgtggtattcgtcaccattttatgatgaagcaaataagtgaacaaaccagaaaaagaaaaaaagaaacaaatgcgtctattttttaagctttcctttttttgttactcacaagtggtagcattttaatgttttttatgtgctgtgaattgtgtacactttatatgtgtgttcatattttaaagactgatctgtaagagttcctgataaaataaggatatcaagcctctgtcataaatgttgcaaatattctcctcagttttttggccattccttggtagttctttttgaaaaggtatttgatatacagtcaagttttatctttttacttctcacctgtgagtcagctacaagttcggcattgcattttactaggtggaggatgccctcaagtcctaagaggtttagaaatactggtggagtctctttgtccaaccccattagggaagtgtgttaatggacaactgagattttatagaatctgaaggagataggggctttgggtaaagcttcctttactgctgcctggattgcttctaaagcttcttgctattggatccccctcaaatgtggccacttgcctagtgatttgggatagaggctgaattgaaactccctggggtgtgaagtatattgtttcgcaatttcaaggaggccactatgatatggagcctcctttttgttgttggtgaattcagggcaagcagactgtcttttcatagcctataaaatgtctctttagatctaaatgtcactttgggtattgggagcttggattttgtcctccctcaaagcccatccatctgtagtcagtagtacttgagtggctcagaatgcagagccacttgttttcttggtggagatcattaatgaaatgcttagaattcccaccgtggtcttgataccagatggagaatgaagcccacaccaaaagcagagatggaaagaactggataattgttgacattcttaaaccacttattcaactgtctccaaaactcccctacagagcatttgtattatataagagaatgcattatcttattgatgatgctggttcaagcaggggtttctgttatttgtagccaaagcctcccagtaggtggagtggcaatattgccaaagccccatgaagccccatggcttctttgtacgccccggagcagaatctaaaacacacagatccgttgctgttttgcaaatcttcgagttgaaatgtcctcgtggctctcctgtagtgagccagtcctttctccttggctgaagtttccccttcctttcagctctcactcttttgaaagaccaccctccctgcactcatcttcccttcagcctcctgtttgggggaaggacgactcactgctgtggggtaaagggagggctcaccggtgtcggggagtgaagaggcagctcactcactacttgggaggcaaagagtatttccagccagagaagatttggagaagactggtcacatggagcatgtttggcttgcaacgtctccctgtctgggaactttaagtggcctgggatactgcttttgggggctactgagaagctcagaaataatgggctttggagtcatttaatagctacttcactttgatagtgtggtctctttccttctctctgctctgtcatgcttggtattggccccatccttgtagctggcttcaagatgacagcatcagcttgagaaataacatcctgaggagtgaaggacactcttcctgtggcttcttctcagaagagaagacattcccagtcctcactgtacccccactgcaggttctattcacattgtaatggtcatcactgtgccttaggcttatcttgagaaaatcactggctactgggaatagaggaatcttgggccctttcaggctcttcttccctgaggccctgccctgggcacacagctgtatgagagtggagcagatatctgaacaaaatgggggttcttcgaagaaggaggatggtgataatggataccatgacaatcaaaggcaccatctataaataccatttgtggagtttcaccatgttccaggactataatatttctaacaccccctcaacctcagcagtgaagtcatattattatctggttttacagaggaaaagactatgctcaaaggtcaagatcttttgatattgttaagtgaaactttttctaaaatactgtggtaatagagtttgccagtgggcagcccagagatagaacttcctgggtggtgcagggacttcagccaagtgctatgtgagacttgtcccctgcacctttcattgagctcctcaggtactgactccccactggatgcttcttgcctctcaccatagaaaaatcacgatcagcaaagtcaggcctgtttctaacatgggaagtcttgccaggcaccaggtagacttacattggaggacaaggtcagaaacaaacctttatagattcgaatgtcttcccgcccccaccccagcccacttggggccacccaaaaaatgatgccctggagccttggcatgccattaaaagtgaagaaatgcttaatcaaatcacgccacttgaagcgagttgagttggaatgaaaaaattgtgcagtgctgcccgcagtggaaatttaccaggccaaagtggacaccaaatactcccaggttgttttgaaatagatacggtcgcgttctgtaaagttctgagatccctttccaaatatttgaaaatctttccattaactaggattgctttagaagaacacacacacacacacacacacctccccaaccccaaaggcttatgctatgtgcatggaagaaacagaaaactctagacaccccaaatatctcttgaaattggcagagatccatgaatcccctctgttgtctgttgagacagctctcatttttttaaagtttatttgcgtattccccctcaaaaatgtcatgactaactttccattcattatcaaaatattcttttgccactaatttcccttcttggttaaaataaacaaaacagagtgaatgctgttggcattgcatctaggatgcactcagctgtaaacaagagaacattttcttaacggatcttgaaaagtcctcccgtgagaatttcctgtgcagtctgtctctgtttcttaactccatttggcgtggagggcagagactcagcggcggcaggaaaggggaggctgcctcgggcttgccagggtccaacgtctcatcccccgcggccaggcccctgcaaggtacctgtggagtcttcacatgacgtggacgccggggctggctaccgtgtgacctcgggtggccattgaacatctttggacctcagttttctcagccataaaatgaagccatcggatctgatgatctctaagctccatcctgtaccaaaactctaggactcaaatctaggaatgtctaattaaaaaaaaaacgtggagaagatacttgaaaacaaaccttaagttttaggatttgtgaagatgcggtgaagagctccgtgggtgagagaaacatttcgtttttcaaaggtcgaacacaagaaaagtaggtcagaaaaccagcttgtccaaagctccctttccagtaacacagacgagagcttgtgaaccccccagaatataccttgtaagtggaggagcagacagggggtgcaaagcagaccttctccacttcctggagctgggggagaagagttcctagctctttagctccttctagtccacggcctaatttgtgtggctgcagtgaggactctgggatgtggggcaggccagcggttcttttttcagaagttccccaggcctcctagagaaatggggagaggtctgagggtgggggtgaggatgactctcagtgcaaagacagggccaaaggtgtccgtctcgggagaaactcacctgaaagtgacaagacgctgagtcctcccttgattgatacggccaatgaaagagggggcactacccagtgtttctcagggagtctcaggggtggtctcctgaggacacatcctccatggaagtatgtgaagcaggaagaagaaatgctagtgacaaaggtgtgacccttcaaggttggccacaaagagacatcatcatctctgctggggagactcttctgtctggaatagtcttgggaggcagcagcaccctgtggtcgaactttctggagacccctgatgtcacgtaaaggcccaaagtgggatggggagggcagccacagcagtgcgtcccaactgcacgggacctggtcagccctgggcatttggaaatgggaagggacctgaggggatggaggcatggatttctatattagtaccaggtggagcctgggagtcaataacactgggagctctcgtagtcaccccgtaaatcagattggcttagggagctgaagatgacattggcaacactcttaacagccgctcctcaaacatggctcccagttcaggtcaggagaccaaggcttggcggctgtgctagtttcaagggaagtgaggaaaacaagaatgagacagtgctttcttccatacatctaaattcatttcacttaaaagactgttctctattttgagagtatgtcttccccaattttggcgttaaaagtatcctttcatgaaataatggcaacacatgataggtttagaaaaaaggtttttatttgacaaaagaggaagttggtacattttgctgagccctgtggccgattcttgtagttttctctccatatttgccttccccttttttcattctaagaggagtttaaaggggcatgtgaccatccagaataaagcttacagttcccaggtgtcccttggagctcattggcccaagttctggccaatgagatgttggcagaagtgatgtatacaacttctggggtgtgtcctcaaagggcaagggtctgtctgttccctgccacttttcctcttcccaaaggctgtagtacagacatggtggtgagttatcgtgactgtgcagatgaatgcaatatcccaggggcggcagagcagcaagacatggggagcctagagtctactatcagcccaggatgcttatggaatgggagagggaaatagccattgatatttcatgtctttggagagaaaaatgagtctgcacttagatgatatttgcagaaatggcagtagttgagatcaaccaggaatagagagtagagggcgaaaagaacagtgcctagcatggagcctcaagagctccaccatataatatttacggcatggaggaagaacccataaagagaccgaggagtgaagctagagaaataggaagagaaaacggtgtgaaggagccaaggggagaaagtatttgtgaaataagggagtggtcagcctgtttctgtgacactgagaggtccagtaagatgaggccccacatgtagccattctgtttaaaacggagatgattggagaccttattaagaattgtttccttaaagtggtgtagtgaaagtctgtgggaatggggtctggggtcagtggcagatgagggagacacaaggagtgtggccacaaaggcaagagtaagagaggccaggtgcaatgtctcatgcctgtaatgccagcacattgggaggcctaggtggttggatcacttgagcctaggaattcaagactagcctgggcaacatggtgagaccccgtctatatcaaagatacaaaaaacaaaaatcagccaggcatggtggcatgcacctgtaatctcagatacttgggaacttgaggcatgaggatcatctgagcccaggaggttgaagctgcagtaagctgtgatcgcaccactgtactcccacctgggcaatagcgcaagaccctgccaaaaaaaaaaaaaaaaagacagtaagagaggataggagctggaggaagaggagggtcttctggtctctccttccctcctctcccctctcccttttctttttcttttctttttccctttcctttttcaaagattgcagccatggtaatttttatttatttatttatttatttatttaagacagtcttgctctgttgcccaggctggagtgcaatggcatgatctcggctcactgaaacctctgcctcccgggttcaagtgattctcctgcctcagcctcccgagtagctgggattacaggtgtgcaccgccatgacaggctaatttttctattttcagtagagatgggattttgccatattggccaggctggtctcgaactcctgacctcaggtgatctgcccacttcaatcttcgaaagtgctgggattacaggtatgagccactgtgcccacctgcagctaggggatttaaatgctgatggaggagatggaaggaacaagctagagaggatagctggtagcaccaggccctcgagaaagcaacaggcacagggcacagagggcatctgtgaaggagctggccctctcagcaggaggagggagaggtgggtgcaaactcagggacatctgtttgtagatttggtgagacagtttgttctcttttctcagtacagtagatgacaaggtcatttgctgaatgtgaaggaaggaaggagtggtttcagacgtggtgagattggagaaggtttgaagtataaattgtgcaaagaagagcctgtattgaccgaaggagccctttgtggttccaattaccaggcagtcctgagggcatagccaagatgggtggctgtgcagttctgggatgtccctccagcagtgatctgctggccaatagcaggtgtagagaaagtggatgatgacatccacccaaggcttgaattttgctagataggtgagacgtaaggacagagaggaagggaatgtctagtacagacagtctctgacttgttccacttatgatttttttgactttgcaatggtgcaaaagtgatatacattcagtagaaactgtacttccagcccccatacagctattctgtttttcactttcagtacagtattcaataacatacaagatacccatcactttattataaaataggctttgtgtgagatgatgttgttcaactgtaggctaatgtgttttgagtgcattgaaggtaggctcagctaacctagcatgtttagctggttaggtgtattaaatgcatttctgacttacgatatcatcaacttaggatgagcttatcaggatgtaaccccaccataagtctaagagcatctgtatttggaggagagtaattacaagattggactattgaatgttagcaggataaaatggaaggtgaagcgagtaaaagtaatagataaggaatatctgggggggtggtcactggactgaaggcctcagtggggatgagagagaggttaggacaggatgctgtggtcagagagtggggaacttgggtttgagatttaggagtgaaggagctctgagtcttggccagatcccagcagtgagcatgggaatgggtgctgaggtggaagaagagaggtggtcactgatcatggggcgaacaaggggccgaggggccaggaccttggctgggccttacacagggatgctgaggcagcaacatgaatgggggtggagaaagttgtgaactgtttgctaaatattggttggatgaggaaaggtgctaagagaagtccagaaatgtcctagacaagggcagtgaaaatccaagattgaccttagatctagttgagcagctaatttgcaggactgtaatttccagaccacacagagaaaaagtctggaagtgactctatggagccaggaagacaggagcccaacttctggttccaaaagtttccatttgagagggctgcaacagacgcagtatctcttggtcagcctggggcagctgggtctcctcagcatctcctggtgagcttttaaaatgcagattccagggccttacccaggctaattaaatctgaaggtttagggcaagtacctgggcacagggctgctccatggccttggacctggacagtggaactcagatgggccctgtgcttgttttaatgctctgctgctgccatcttgaaaatccttaatgtttgttgaataagaaagcctgcatatttgtcttgtgcttggcttcagaaattaggtagccagccctttctgggcagaagtatctttttaaacatttcctcaggggattctgatgtgaagccagggctgggaatcactaagttaagccaagagtcggagggaacattcgatgagatggctgagatgcaaaggtagagagtttgcgatcatggagcaagaatttggagagcagcatcggaggcaggagggagagggggatggcagattgagtcaggaggaagatgggagagggtatgatgggagaggatggatgggtatggaattcccactctaggtttccacttggttccttggagaaggataagtgctttggcataagagaagtctgcttcagcctgaaaggaagacccagtggtgggtggggtgtggagctggagatcctttgccttgaggtcttctggggagtgcatgtgtacaaaggtgggctggggcgacggataggagagcagggcctttgcagggctgggcatgagtgtgagcagcctggtcacatggctttgggctggttgtgctgcatataggagttgtgtgtttgggagggtctccaggtctccttggagctgagtgactcatgatgttttggctggaggacaagaactgggagctgccgttacatagatggggcatagagcaatgtcagtctcaagtgtggataacttggaatgttcagggaaccttatcagggatgtggcatgtccatgggaatcctatttttccctgggagtccaagaggaagtgagcggtgcaaaggaagccaggacagggctctgagaagagaagactccccagagaagtgagccgtaaacacaggcaccacagggtcacgcgttcatgaaatgttggttgtttttctaaactatgagagataagaggcagtgaaatcttccctctgcttaagccctttagtgtaaatatttctttcaaaatcaacccagatgggactgggcctggagaagcaaccaggtgcacagtcatgttgctccacctctgcgagctgcctgatccaggtcctgctatgaagggacaaggccggacaaggtgcctctgagaaccccgaggctcctccaggaaggatgactccctaagagcagacgggaagctgcctgagggaaatttcatctcctgagcttgtagcttgtagtttggtcaggagagcagcaagcaccattgtcgctctcccaaactcaaacatagctgagcaacaggagaggatggcgaagggtgtctgctccagcacaccatgccaaatcgaagctaggagcagctggggaataagggtgcattttatccagcttggcctcaagggagtctggcctcctgcttgctggcctccagccttttgtggtccagcttaatctgtttcaagggcatctgtggttccactccaacgttaagcctgagttggtactgagtgtccccagcagacagccacatggtggaaggttcatacttgggtttcctaaactgtattagtcagggttctccagagggacagaactaataggcgatatctatctatctatctatctatctatctatctatctatctatctatctaggagtttattaagtattaacttacactgtcacaaggtcccacaataggctgtctgcaagcttgaggagcgaggagagtcagtccaagtcccaaaacggaagaacttggagtctaatgttcaagagcaggaagcatccagccctggagaaagatgcaggctcggaggctaggccagtctggccttttcacatttttctgcctgctttatattcactggcagctgattagatggtacccacaagattaagggtgtgcctgccttccccagcccactgactcaaatgttaatcttttttggcaacaccctcacagacacacccaggatcaagacttgcatccttcaatccaatcaagctacacttagtattaaccatcacacagactaacagcagaatcaggagcctcaccgggagagcgcagagcacattgaggcagtagacatgcgctccaggccacttgggatgtcctgctctccatagaaatatactaacattatacattctcaatatgcaaatggccaatatgcacatgaaaagatgctcaacaacactaatcattagaaaaatgcaaaacaaagccacagtgagataccacctcacacccattaggatggccactgtcaaaaaaagaacgaaggaaggaaagaagggaggaagggagggagggaggaaggaaggaagggagggagggaggaaggaaagaagggagggaggaaggaagggaggaagggaaggagagagggagggagggaggaaagaataagtgtagaccagcatgtagaggcaaccctggtgcactgctggtgggaatgtaaatggtgcagccactgtggaaaatggtaagacaggtccttaaaaaattaaaaatggaattaccacagcatccagcaattctacttctgggtatatacccaaaagaattgaaaacagagtctcaaagagatatctgtatgcccacgtttatagccgtgaatggctattcacgtagatgaatggaatgagccaaatatagcatatgcatacaatgggatgttattcagccttaagaaggaaggaaattctcacatatgctaccacatggatgaactttgagaacattatgccaagtgaaataagccaggcacaaaaagacaaataactgtatgaatgcgcttatatgaggtactgattcttcaatggatatagagtttggtttctacaaagttctggatgtggatggtggtgatagttgcacaacataatgaatgtacagtcatatgtcacttaatgacagtgatatgttctgagaaacgtgccattaggtgattttgttgtgcgaacatcataaagcgtacttactctaaccgagttagcatagcctactacacacccaggctgtaacggtaaagcctattgctcctaagctacaaccctctatggcatgtcactgtattgaatactggaggcaactgtaacacaatgataagtatttgtgtatctaaacaaataagattataatactgtaaaaatactgtatatgataaaaatactgtatatgacaataccactgtcttatatgtggtctgttgtcgaccaaaacaccactatacagtgcatgactgtacttaacaccactgaactgtacaattaaaaataactaagatgaggccaggcatggtggctcacacctgtaatcccagcactttgggaggccgaggcagatggattgcttgcttgaggccaggagttcgagaccagcctggccaacatggtgaaaccctgcctccactgaaaatacaaaaattagctggacatcatggtgcacacctgtagtccaagctactcgggaggccgaggcatgagaattgcttgaatgtggaagatggaggttgcagtgagccaagatcacgccactgcactccagcctgggtgacaaagtgagactctgtctcaaaaaacagaaaacaaaacaaaaaaagactaaggtggtaaattttatttatgtctattttaacacaataaaaaatgaaaacttttttagattttttttttggatcaacagaacctgactgctttgaagaagtctgactcccctattttgactgccagggataaaatggtcaggaaagcctgtcttattagtgggttggttgagtgactggcaatgtgataccctttggctcccgtcctcactactgaagattgcttaaaccaccattggaaaggatgggtgctgagcaaatctacacggagtgccatgaagaaggttccacctcctcttgacctcggaccccagagtcacatccctaaatggacagtgtcaaaagaacttgggggttgcacttcccatccagccaattcatcctttgctcgagaatgagtgtgtggggtttactgtgcacacctcctgagttttccagggtttcatcattttgtccccaactacttgcaagttctatgaatttctccatcctccctgaagccccttccatctgccttccttgcctgaggacctgcccctaacctcttcatttggaactctttaaactctttgcttggttggctctttcccacttaattcttcttttgcatcagaggagggtggaggggcttcaattaggaagatggagaagaaaaggaagatgatcagagtctagattctggaagagagttgactatccccatcctctgctccaccccgaccctggatgcttaaagtcttgcacttccaggttcatctcttgctgagacttgccagagcctgtgaggcagcacttgctagaagaatgtccactcctcatcaaccttcaaacacattaaaaagtcaccttcgcttgttcatttccaacatctgagttccctttcactgcaacaggtaggggacaccattctggtgcatgcttttcctggtagaaatcttcgtgcccttgcaaagctgagaagtagctccttcctccagggtccacactgctgtgtcgcgcacctgttcacgaggcacattcctctccagctctgggctgctgcatgtcacctggcatatcaggcagctctcccagcaccttctgtaaatgttagcgttggttcctctgcctcagaagttttttctcagacctcatgatcacatcacttcatccctggaggcattttcttgtccagaatgtctctgatgctcaacagcatctgtctctgtctgaagatcagatataaggactccagcaccccctgtctttgggtggctaatgtcacttatctatctgcagcccatgccctaaatcagtggtctccaaacctatctcgttatgtgacacatttagtaaaatgttggggggcagggccgggcgtggtggctcacgcctgtaatcccagcactttggcaggctgaggcgggtggatccgaggtcaggagattgagactatcctggttaacatggtgaaaccccatctccactgaaaatacaaaaaattagctgggcatggtggtgggcacctgttgtcccaggtactcgggaggctgaggcaggagaatggcgtgaacccaggaggcggagcttgcagtgagccgagatcgtgccactacactccagcctgggcgacagagcgagacactgtctcaaaaaaacaaaaatgttggggggcacataggtttacttatcaactatatattatgtaaattataagacatacatacaattgaaactaaaaggatgaacaagatgaaataaacaatattttgagtgccactaattgtgacagctttgtattaccattcgttagtacctgaaggcataatatacatttagatttaaggttcatcgttaacaataagggttatagatatgcattcgaagtagtcttcttgtgaatttctatcttcttttgactggcttcttgtcagatctgaatagctccatgcatttttatgtatttatttatttgagacaggatctggctctgtcacccaggctggaatgcagtggcattccacagctcactgcagctcactgcagcctcactgcagcattccacagctcactgcagcctcaacctgggttcaagcgatcctcccacctcagcctcctgagtagctgggaccgcaggtgtgtgccaccatgccggctaatttttatttttatttttgcagagacagggtctcaccatgttgcccaggctggtctcgaacttctgggcccaaacaatccccccaccttggcctcccgaaatgccttgcatggcctcagaggagctttccctgtctcagtgtgaggagagaagttagcaccaccttttctttttgcttcctgtgtggtggccaggtcagtataatccccaatcaacttttaaaatagtaatctactaaatccacccattcattgcatgagaattgattgcattactatagatggtctaatctataaatccacttacctgcctgcaggtagattgctctggtcactctgaccagggcttgtctgtccctctgaggtgtggctgttctactccctaagaggcttcaagtcctgcatgtgagggactaagtgaggggacccatgagcaccttcatataaaatatagtatattagctcacaaggattgttctatcaaagtaccacaaactaggtggtgtaaacaacagaaacatattctctcctagttctggagaccagaagtctgagatcatgggtgtccactgggtgggttcctcctgaggctgggagggaggatctgttccaggtcccactgccctggcttctgggggttgctggcaatctatggtacttgtggacacggcacccccacctctgccttcatcttccatggtctaactctgtgtgtgtgtgtgcacgtgtgtgtggtccaaatttctcctttttataaggatatcagttatattgaattaggcctcaccctactgatctcatttgatcatctctgtgaagactttacctccaagttaggtcacactctgaggtactgggggttgggattccattatatgctttttaggggaatgacgttcaacctataacactctgtgaagctcacttttttctactttctagataaaataaacagaaatagaggttctaatggcttcctttggcatccccacagagagtggtctgttgctcccacggggtgtatgtactctcctatggaggccactgccttatcagttctggccctcctcctccccttatgatcactcacccctagttctcactaggagcagggggatgtgggatgttgatatggtttggctctgtgtccccacccaaatctcatctcaaattgtaatccccatagtccccacgtgtcaagggagggacctggtgggaggtgattggatcttgggggtgggtctcctcgtgctgttcttgtgatagtgagtgagttcttacgagatctgaaggtgttaagtgtttcgcagttcctccttcacatgctctctcttgccttccaccttatagatgtgactgcttccccttctgacatgattataagtttcctgaggcctcctcagccatgcagaactgtgaatcaattaagcctctttcctttataaattacccagttttgggtatttctttatagccgtgtgaaaatggactaacaccagtgtggagtagacgaggaccgtaggaactccacctgagatcttcagaagattgatttaacgggaaacttctggtgtcaggatagccaagtgagccactggctagcctcctctccatcttctcccttgctctgaacctcagaaataatactaaagttgtgtgtaccacacaactttttttttccagatagggtctcactctatcacccaggctggtgcagtggtgtgatcacggctcactgcagcctcaacctccagggctcaggtgaacatctcacctcagcctttcaagtagctgggactacaggtgcacaccaccctgcctggctaatttttgaattttttgtagaaacaggttttcttcatgttgtccaggctggtcgtgaactcttgggctcaggtgatccacctgccttgtcctcccaaagtaatgggattacagacatgaaccaccgtgaccagctcaagacatagtttttaagtgaagacataactgtaaacaagaagggggagaaacagttttacaattcttcaaaaagttagccacgaaattatcatatgactcagctattccactcctaagtatataccccaaataattgaaaatatattcaaataagaaattgtatatgaatattcataacagcagtattcacaatagccaaaacgtgaagcaatccaaatgtccaccagtggagggataagcagcatgtgggataatccgtatagtggaatattattcagccataacaaggcatgagatgcggatacatgttacaacatggatgaaccttgaaatcattatgctaagtgagggaagccagacacaaaaggtcacgtgtgatatgatttcattatacgaaatgttcagaatagctcaatccagagacagagagccaatctgtgattgtcaggggctgggaggaggggagaatggggattgactgcttaatgggacagagttttctttcgggtgctgaagatggtttggaactagatagaggtggtagttgtgcaacattgtgaatgaacaaaatgccactgaattggacactttaaaatggctaattttaagttgtataaattttacctccatttaaaatataaagcaagaaggtgaagtcttggagaatcagagacgtgtactctgtaaccaggaatggcttcacatgtgaaggggactcagtctccaagttggtgccatccagtgtaacaaaggccctacaatcagcctgggcagcctccactaacttggtcatgtgaaaattctagcaacaacatggatttaaaaacaaaaacaaaaacaaatggcttgatgttttctgctgttcagagctccaggacaacgtcaacgtattaataaccgcaatttacaagaccccttcctgtcttctgtctcacttccaaaccttcaaatcttgtattttaagttcctcctgttgtctctggaatgcagttaattgacttggaatgactataatctccggtagagaataacatgcttactgggtcaatagctctttctcaaaagagctgcacaaagcagattatgtgtgaattcagagaatgatctttggtgccaagctgtgttggatttgaaatgtcctgtcaagtttcagattcacagcttgacatttatatggttatttatgtcacttattaactgtggtatgtttgtggcaatctagttatgattgccctcctagcttgtgaatagcaagaagagattgctttgtgacaagagctcaccctgggatgttctgttgaacacaacttggggaggatggggatcgaaagggctgatggctttgttatgtattatttttgctctgtgatgttctagaagcttttgccccaagaacactggttgccaggtattctgctgctctgggtccaggaaaaggcaggaagaagcttgtgaatctgcttcaggtgcatggtcttgaacagcctttgtttctaggagatgcggaggcactcagagaaaagccctggatttctttaaggtggtttggagatttggcctgagtaggggattgtggagaaccaatattttgcttttggagaaatttgtcttaatttttgacattctggcattaaaaacaaagatattaaactgtgatttttagcttttgcctgctgtgcaggggtactgctctgtgctgatgggcatgtcctctctaatgcagacctggaatgaaatgaactcacattccaaggcttctggttataatgtttgccctccctccaccttccccaccctgtggagctttagggtaaaaagggttatgatgtggagctttagggtgaaatgggtaggatgaaggagaggctggggcaacagaagagaggagctttgggttcagctcagaaccaaatctactgggcttctccagctacagatgaggttcttaagagggcgctctatcctgacacttccagaagaaccagaaaaaaagtttaaaagcctatctgggccaggcacggtggctcacacctgtaatcccagcactttgggaggctgaggcaggtggatcatgaggtcaggagatagagaccatcctgtcaaacatggtgaaaccccatctctactaaaaatacaaaagattagctgggcatggtggtgggcgcctatagtccaagctacttgggaggctgaggcaggaaaatcatttgaactcaggaggtggaggttgcagtgagccaagattgcgccactgcactccagcctgggcaacaaaatgagactctgtctggaaaaaaaaaaaaaaggccgtttgtgctcctatcaaactactaatgacattcttcacagaataagaaaaaacaatttaaaaattcatatgaaacaaaaaagagaatagccaagaatcctaagcaaaaagaacaaagctggatgcatcatgttacccaacttcaaactatattacgaggctatagtaacctaaacagcatggcactggtacaaaaacagtcacatagaccaatggaacagaacagagagcccagaaataaggccacacatctacaaccatctgatctttgacaaagctgacagaaacaagcaatggaaatagtcttccctattcaataaatggtactgggagaactggctaatcatacgcagaaggttgaaactggaccccttccttacaccatatacaaaaatcaactcaagatggattaaagacttaattgttaaacctaaaactgtaaaagccctggaagataatctaggaaatgtcattctggacataagaactggtgaagatttcatgacaaagacaccaaaagtaattgcaacaaaatcaaaaattgacaaacaaggcccaattaaactaaagagcttctgcacagcaaaagaaactatcaacagagtaaacagacaacctacagaaagggagaaaatatttgcaaactatgcatctgataaaagcctaataaccagcatctaaaaggaactcaaacaaatttacaagcaaaaaacaaacagccccattaaaaagtgggcaaaagacatgaacaaacacttttcaaaagaagagatacatgcggtccacaagcatgtgagagaaagctcaatatcgctgatcattagagaaatgcaaatgaaaaccataatgagataccatctcacaccagtcagaatggctattattaaaaagtcaaaaaataacagatgctggcgaggttgtggagaaaaggaaatgcttatacattgctattgggagtgtaaattagttcaaccactgtggaaagtggtgtgatgattcttcaaagaacttgaaacagaattaccatttgactggccatcccattactgagtatacacccaaaggaacgtaaatcattctatcataaagacacatgcatgtgtatgttcattgcagcactattcacaatagcaaagacatggaatcaacctaaatgcccatcagtggtagactggataaagaaaatgcggtacatatacaccatggaatattgcacagccataaaaagatgagatcatgtcctttgcagcaacatggatggagctggaggccattatcctaagcaaactaatgcagcaacaaaaaacccagtatggcatgttctcacctataagtgggaggtaaacaatgagaacacatggacacagagaggggaacaatagacactgggacctacttgaggctggagggtgggaggagggagaggatcagaaaaaatacccattgggtaccatgcttattacctaagtaatgaaataatctgtccactaacccctgtgcacacgatttgcctatataacaaattgcgcatgtacccctgaaccaaaaataaaaattataattaaacaaaaaataaagaataagcatgtctgaaaagaaataccacactgagactgcaagacactgcgagacactcagtaaaaagatgatccccaaccctcgccctcgctgctggttgggaatggattgtctcgcacccatctggttacaccctagtgacactgtcctcctcttgaccctcaggacttcagaatcactcagtgttttagggcagggaaacttattcacattttgccactttcttggaaagtgacctatactgctggtttccacttttagaagatctaattaagggatgattgacactttcccttccccaaaccatcttcagctcttgctttgcttaagttagaatgccatttgccacagacctgttgctttgcaactgggtgagaattttggcccaggctgcttgaatcagtgactatctatctatcccgagtctctgagacttcagacaggcacaaccactgccattctgtcaggcagaggagtttctgtaagggaaaacagatgagaaaaagttaagggaagacccacacaaatatgtcaaattgactttttttatctgctggtggctcatgcctgtaatcccagcactttgggaggccgaggtcggcggatcacaaggtcaggagttcaagatcagcctgaccgacatggtgaaaccccgtctctactaaagatacaaaaaattagccaggtgcggtggcatgcacctgtaatcccagctactggggaggctgaggcaggagaatcatttgaaccctagaggtggaggttgcagtgagccgagatagcgccacggcattccagcctgggcaacaggtgagactctgtctcaaaaaaaaaaaaaaaaaaaaaatttatttcagagtctcactgtcgcccaggctgccatgcagtggcatgatctcagctcattgcaacctctgccccactgggttcaagcgattcttgtctcagcctcctgagtagctgggattacaggcgtgagccaccgcaactggccgagttttgacaaagatgcaaaagttactgagagggagaaaaatggccttttcaacaatcatgctggagcaatttatactcctctgcaaaaaaatgaatctcgacctaaacctcacacatgagacaaaaattaactccaaatatgtcatgaacttaagtgtaaaatacaaaattttaggaaaatgtaagaggaagttatggggacgtagtgatcaatgatatgttccttgacttgataccaaaagcatgatccataaaagaaaaaattgataaattttacctccttaaaattaaaaaaaatttaaaaatatttgctctgagaaagaccccatgaagagaatgaaaagacaagttacctcctgagagaaaatatttgcaaaccacatatgttagtctgttttgcatagctataaaggaatacctgaggatgggtaatttgcacagaaaagatatttactttggctcgtggttctgcagactgtacaagaagcacagtgatggcattgacttctgagaggcctcaggaagcttccaatcatggcagaaggcaaagggggagtaggcgtgtcatatggcaagagtaggagcaagagagagagagagaggaggaggtactagactcttttaaacaatcaatgcttgctggaaccaatagaatgagaactcactcattacaatggggagggcaccaagccattcatgagggatctgcctccatgacccaaatgatcccaccaggccccatctttaactctggggattccctcccctcccctcccctcccctctcctctcctttcctttcttttcctttcctttctttttttttttttttttgagacagtctcgctctgttacccaggctgaagtgcagtggtgcattctcagctcactgcaacctctgcctcctgggttcaagcaattctcctgcctcagcctcccgagtagctgggattacaggtgcgtgccactacatccagctaattttttgtatttttttttagtaaagacggggtttcaccatgttggccaggctggtcttgaactcctaacctcaggtgatccgcccaccttggcttcccaaagtttttgttgagaagctcccaacaatggggtctacaactcttcctgtctcacctggcccagtggttcttagccctggctgcacattagaatcactggggaatctttgcaaaagcttacaggtgtgagctgccatgccccatggatcacatttcaacataagatttggaggggacaaacatccaaaccatatcaccacatattggacaaaatacttgtatagactgtataaagaattctcaaaactcagcagtaaaaagcccccaaaatccaattagaaaattggggaaagacaggaacaaaacttttcattgaagagaatatgcagaagcacacgaaaaggtatccaacaccgttagccattagggaattgcaaatttaaaccacaatgagatatcactgcacacctatctgaatggctagtgataacacctggttcaggcaatgatatggagaaactggatcactcacacattgctgacagggatgtaaatggtacagcccctctggaatagtttggtagtttcttacagaactgaacatgtgcttgccatatgacccagcatttgcacccttgaacatttatcccagagaaatgaaaccctacgttcacacacaaaaacacctttacaaaaatattccaagcagctctacttgtaatagccagaacctggaaacaacctcaatgtcctgtggtgagtgaatggttaaacagaatgtggtccatccatactagtgtcaatttcctgggggtgacattgtactatagttgtgcaagagggtgctgttgttgggagaagctgggggaaggggtcttcctgaaatatttcttacaactgcatatgaatctataattatcccaaatgaaaagcttttaaaaagtcaagcaattgtaggccaggcatggtggctcacgcctgtaatcccagcactttgggaggccaaggcaggcggatctcaaggtcaggagatcgagaccatcctggctaacacagtgaaaccccgtctctactgaaaatacaaaaaattagccaggtgtggtggtgcacgcctgtagtcccagctactcgggaagctgaggcaggagaatcgcttgaacctgggaggtggaggttgcagtgagccgagattaccccactgcactttagtctgggcgacagagcaagactccatctcaaaaaaaaatgtgaagcaattgtagatactgagggcagcgaccccagcactgggcttttaaagtcccttatggtgctgggagctgaggaaaatggagcctttggttgaaaatggaattaatgagagcacgacctctcaccacatgatccatgatccagctatcatgctctgtggtatttacctaaataaactgaaaacttatgtccatgcgaaaacctgcacacagatgtttatagcagttttattcataattgctgagacttggaagcaaccaagatgctcttcagtaggtgaatggataaacaaactatacatcctggcaatgaaatattactcagtactaagaagaaattagctaccaaaccatgaaaagacatggaggaacctaaaatgcatggtactacgtgaaagaaaccaatctgaaaatgctatatacagttatgcactggatagcaatgtttcggctgatgatggaccgcatacataatggctatcccataggactataatactgtatatttactgtaccctttctatgtttagatacacaaatcccattgtgttacaattgcctgcagtattccctactgtaatatgttgtacaggtttgtagcctaggagcaataggctatgtacggtatagcccaggtgtgttgtagcttacgcctctaggtttgtgtaagtacactttacgatgttcacacaactaaaacatcacctaatggctgatttctcacaatgtttgtctgtcgttaataaatgcatgactctacgtatgattccaactatatgacattctggaaaaggcaaaactgtgaaaacagtaaaaagatgagtggttgccagaggttggctgggaaaggaaggacgaataggtggagcacagaggatttttagggcagtggaactattttgtatggtagtacaatagtggattcatgtcatgcatttgttcaaactctcagaatgtacgacatcaagagggaaccctgatgtaaacctggactttgggtgatagtgatgtgtcagtgtagcttcattgtttgtagcaaacgtcccactctggtgtgggatgtcggtagtaggggagtctgtgcctgtgttggggcaggggatagacaggaattcttagcaccttccactcaagtttgctgtgaacctaactctgccctaaaaaagaaagtccatttgataataatattaattgcttctcagccttttggctaagatcaattataaaaattaatatgagcaaacctctattaatatttttccacagttcaaggtgcttttaagaacattttctcctgtaagccttatgaccatcctctggggcaggtggaaggtggagtgtgttaaacgatggtgagtcctgtgtgcagagtacatgcagcaaaggcctggggaagaagtgtgccctgcatcctctcactcccatagccagcaggaggcacccatgtggtcaaggacacacttttccttcaaggatagggatagggcgagggtggggattggggctcaccagtgaaatgagctgggggtgggtgttgaggctccagctcagacaagctggatagaggcaaggaaaagaggtgtgtggtcccagcatgagggtaggaccaggtcagggaagtgctaggtgccagctgggtcactggctgccacagcttagcacgtcagtgggacactactgtgcagacaaggaagggagaggaggaaggcaaaaagaaggccagtaatggggtccaataaaggacattttggatctcaaaatgggagaggtacgagtctgaaatctgggatggatccagtaataaacccaaagtgctgatttatgttgggaatttatatgtagtcagaaaatgggagaggatacagtgggagtgatttttctgggggccatgactaggtcccatgactgctggctttcctcctttatgctttctgaagttatttatctctttaccaagcacttgtgctgggcacatggttgggtacataggcattcctgctgccaagtttggtggagaaagctgtctccctcttgtggtctcctggggaaaccacttggtcctctcttgccaaggagagaggggctgggattttgggagtcttcagaggccaccttggtgcttccaggtgtcaggccacctccggacaagaagcaaagattgggaagtggaggtcaggcttgactctttcttgggtattttagaccaaagggaattcacaggaaacctgaaaactgggggaagtgaagaagaaaataaagcaactgcagatggggcagaagattctagagccttaggggctaactagtgctgccactttggtagaaggaacaaaatgtttggaaagagccaggcaaggagtgctttatccttcatgtcctctttctgtgagcagctctcatgaccctatccaagatgaccagggacaccctcttcctatgcagtgtggcagcagagtcccactcttctgcagactgtaatgatgtttccttatgagaacaattacaatgatttgagagcaagcaatggtgttctaagtacctgtggttgtctaattccttgtaacaggaccaaagtcttggatctccttgacatccttggagatctggtgtggtcagcagaggtgttgacttgggccatgtggcacaggtggccaaggggccagtgttcctgcctcctggggcatcccagtccatctcagctttggggaatcccaaggctgacctcgtccttaccaatgaccgaatccagaggttaagaaaggaaaaaatgttgatgcttactggaaagacaggaaggagatttgccctagtggcagctctgtttggaacttgaggaagtcagattggacgcccctgggaagcaagccccttcacctccggggatgaggggccactcatcttggtgacctactgcatttgggtggcctttaatcactgcgggtaaggcccatggcctgtctttctctccctgctgaccatgagctacaggagggcagatcaggtcccttcactgggtcctttctagtgaaactcagctgtgcggggctgacagtgtcagctttttggcccttgtcatgacgcactgaatcccaagagagttggtgaacttaattagagccagaggctcttacttgtctgcatctgccgcctttaatcccaaatgaagatgttttaaaaatccctggacattttgcttttacatttctgatttcattttactttaaactttttattttgaaaattttcaagcctgcagaaaagttgcaagaatagtgcaatggacatctgcctgctcctgacctacacttaccagtggttaacattgccacatgagtctctagctctttccatatggaaacttattactatcatttactgaaccatttgacaataagttgcagacaccatgatccttcattctctaaacattaagatgaagaacactcattttcataatcacaacacagttattacattcagaaatttcaacactaacacagtactaatctgtaatatgcagtctaagttcatatttaaccaatgtcccaaaaatgtcctttacagtaattttcttttctgttcccaagtaaagaccttttatccttagcgtcaacaattgttgaaaaggtggatttggctacatgcacactcacacacctgtgtgcacacacacccatacacacatggttttagtttatttactcatttattttttggtgacaagcagcctcccctgctgctgcaggcttctaaccactctccaggctcattcttcccagtgctggagaaagtggctcaaggactctgtctcatcttgtgggaggaggaagggaggatgaattcaaacaggatttgaggcctggccccagttttcctgcaaggatattatgctcttgaattatcagtgggattcagggagcttttgcttttaacttaccatcgtccatgtatagaatcagaaaacatggagccgaaggagtccacggaggtcagctgctgctcatctttcctcatttgacagagaagaaaactggaattcagggaggtgatgtgactttgccaagctcacttagccagtgctgatttttttttaggtgtccagctattttgcagacatccaaatctgggaagcagggaacacatagaaagagtggtccccagagagaatgagaaccagtgacatgaacatgcttcttgaaagatgaagaggcaaaactttgggtgccatgttgcccctgtgacttgtagctgcaggggagctgggtgtcaggcttactacctctgaggggtgaggggccaggctgaggtggttcccaggctcttggtgctttctgtcgggagtccaggcaggcagagggttgtgagactatctatgcttcttgtctaaccactctgggttttggtgtcctactttggcttggagtccaccatgaagaattcaccataacctgctcttcttgcttttgaactcaccaagggatgagacacatgctcagggtgaatgaaaaaatcgtatttaaaataatcctttcttaagtcatacccaatcttacttcatacaatgtggatcttacaggattcaacaattagtcaaaaagtcatgagctaacaaaataggagctttctgccaagaacccctgtgctgtggattttggggttggaatcagttgcttgatttatggggatcccatccactggaaatgcagaaccatgtgccagagtggtggagcatcattcctgctgaagatggcttggaggaaagcctgaccaagctgcatctgttttgcagattaagagagacacacacaaaacaaactgttgtgtccctgcacttccatggcctgtgatggcctaagcaaagccgtgatggctgagcattaacatgcagtgaatggaacttggccttctttggaaaaaatcttttttgttttgaaaaatatttgaacaccatattcagaagttcatgactaccgagagggagttttgggcaaataatcagcccctatccccttttcaggatagattttctgttttaatttccaacaacaaacagcacgaacagaatatggacatgtattgagagttttctatgtgccagacactgttctaaatgcattacctattgttttcttcgatcctcagcacaatcctatgaaataagttcccatttacagatgaggaaaccaaggctgagagaagaggttaagtaacttggctaaggtcacacaataatgaaacagcaaagtcagattcaaatacaggtagtctggtgcccaaatgcacactcttaaccactattctttatgttctcttaacaaattcgtcattctgttgtaagtgagtgagtgttagaggtgggatgtgcctggaatgcagattcctaggtgattcttcttgggtgtagatctgatatgattttgccaacttctaagccaatgtggggcattcaggtcacaggactggatctgtagtgtgttgttgagccctggtaggtggtgtggcctctgggtgaggtaacagcactgcttcatttaccaagtgaatgttggggagaagtagagtggtaggcagcctccaaaatggcccctagtgatccccaggtcttggtatttatgtccttgtgtaaatccttctcctccaatgtcagctggacttagcgacttgcttctaacacatggaatggggcagaaatgatggaacgctactgccaagatggacttataaaaagacagtgctggccgggcatggtggctcacgcctataatcccagcactttgggaggctgaagtgggcagactatgaggtcaagagatcaagactgtcctggccaacatggtgaaaccccgtctccactaaaaatacaaaaattagctgggcatggtggcatgcgcctgtagtcccagctacttgggaggttgaggaaagacagtaccttccatcttgggtactcattttctactggctcactcgtccttggggaatccagccagcatgctgtaaggtagccctgtggagagacccacacagtaagtgagtgagatctgccaaaaactgaatgagtgagcttgaagatgaatctgtccgaccccagtcaagccttcagatgaaactgcagccctggctgacagcttgactgcaacctcatgagtgaccttgagccagaggcactcagcaaagctgtgtctggattcctaactggcagcaattgtggcatggtaaacgtttgttgtgttcagctgctaagctttgggatgattggttacactgcaatagataacgaatgcaaggagcagctgggacccatctcctcctttaggtgtcacctgaggtgctcggatggactaagccttggccaatctgcaggttttcaccagcccctctggtggttcctgggtgtgcactgaatgtgtatgttttgcttgatgtctgagggtggcagaaaggaaagtgagtttggaccaaccaccagggtgtagaaaactggcctggccattgaagcccctgtctccctactccattctgaacttggatgaggagacagatcattcaggcttgtgggagccacagccacccaataagttttacctcatgctcttgccatccaggtaccctgattccctcaccaaaaaataaatcttgaccgaaaactctaaattatacacagcacttccatgtacattctcctttgaattcttataattgccctaggatgcaggtagatgaggaaactgggtctccaatgctggtgtaactctctgtattgtttacaagttcttttacgttcaaggtctcttccaaggcatacttatgtttgagctcagaggagttgaaagaactgctggagccaggacctaaactcagacaaaagaaagagagccccagcatagcaccctgctgcccctgcctggcttctaagcctctgtgtacctctgagcctcaccctgcctcttgggtaccacagaagaaacacttctcaggagagaccatctggagaaggagagctgaggagttaggctcccctcagagggggttctttaaaaattctgaaatgatgtcattgaaaaatatgcacacacacaaaaacaaaaccccctctgaaaaccacattttgtttctagttataaattgaggataataacattgtgtttgattttcagggtttttatgaagattaatttttatgaagagtaattacttggttaattaattcagcaactcaacaaatatataacagaatgttttccatgtcccaagtattattccagatactcagaatggtggagcacaagatccagaaaatttctccccacatgggcttgtattcaagtgaaaagatgtacttcctctgcaggagctaaacctttctatggttataattagtgtgcagaggtgggctacttttttcactgaatttatgtcatatgcactgttgcataggttttagtcactccagtattaaataatttaattgcaacagtttacttaatcttgcctaattgatgggcattttgatgttttcagttttgaccattatgaagagtttctgtaaaccattctgtataattaactttcaacaattcttttgaattatttccacaaaataaattcataggaggggatttgggctaaaggatgtgaatttttttttttactctttttagataataccagatcacactccagaaattatcaaatcaaataactatcaacaaggttttttttttatacccagcattcctagcattggtttcttgatcatttaattcctttttgctagtttcataggtacttgaattttatgaagttgaacattttctttcatgtcatataaacaaatctagttacattggattaagatgtggtaatgacatctcaaaagttgtagtgatggccaggcatggtggctcacgcctgtgatcccagcactttgggaggctgaggcaggaggatcacctgaggtcaggagtttgagatcagcctggccaacatagtgaaacctcatttctactaaaaatacaaaaattagccaggtgtggtggtacatgcctgtagtcccagctcctcgggaggctgaggcaggagaattgcttgaaccggggaggtggaggttgcagtgagcggagatcgtgccaatgcactccaacctgggcaacagagcaagactctgtctaaaaaaaaagaaaaaaaaattgtagtgacttaaaatgacaaaagttcatttctttctcatgctagattcccactgtgagttgagctgttcctgtcctcattctaggggccagacggtggggcagccaccgtctgaaacgctgctggtcactgaggcagtagacaagggagagtagcaaattacgtataggttattaaacagtctggctggaagttacacatgttactcctgccatttcattggccaaagcaagttacatggccatatcctacttcaagtgcaagggacctttgattctatcatgggaccaagagaagatacagaaaaaccaggaaggtagaactaatgaccatcacatcatggtttagtatttgtgaattttcttttataaattgactatttatccttttattgccttttggtatgcagtgatccagagagaagagtataacgttctttatttgatgcttttctctgggaatgttatgttctcacatcatcacccagtggaactctgatatggcctttcctcttcttcctgttcttttaccaacccaagatcagcattaactgggggtgtttcttactttgtcttcccttttcctttttgctaagtcagaatgacaaccttgagaagcatccagtcatcttttccccattcttagtgcctgggcattgctctttcaggttttcctgcagttttcagactaattggcatgaagcctgaggagtcactttgagccaaaatgtcaatggacctaactaagtggtgattacaggatagtgagttacttgttccctttcaaaggcaagccagtttggcttcacttctggttaactggtgcttcctttgatgtcactcgcgtaaaagagagtgtcattaaaaacaatcaaagcggccaggcgtggtggctcccacctgtgatctcagcactttgggaggccgaggcaggcggatcacgaagtaaagagattgagaccatcctggctaacacggtgaaaccctgtctctactgaaaatataaaaaattagctgggctttttggcgggcgcctgtagtcccagctactcaggagtctgaggcaggagaatcgcttgaacttgggaggtggaggttgcagtgagctgagattgtgccactgcactccagcctgggtgacagagcgagactccgtctcaaaaacaaaacaaaacaaaacataaacaaaaagaacaatcaaagcatatttgtgctccatttaaaaagccatttggtgcatttttcattatctgaccgagagtatgtatttgctttagataaatgcagatctaattttcctttcaatataaacctgagaactctaatgagctgactcgtgtctttctcattggatctagcacttcatgtacacactaattagaaaagaaacagtttgatgaggtaaagatgtggtttccattgggggcagaactttcaggaaaatgatgctgttcttagtagggattcctagcactggctggaatatccccatttggggaggaggatctcaaatacagaaagagggaggaatcacttatggtaaaagaacaatgtgtgtgtgtgtgcatgtgtgtgcacatgggtctgggaggccacacagatactggcaaaagagaagctgagaaagtcaactccacccagttctggagaggcaggtccctaggacacatctctagcggctgaatactgagaaatgcctgcttgggcagtgggtttaaaggggggacagggctctcttccacttgctcccagggtgggttaggagctttgcaacaaaaacaatggggtctataactcttcctgtctcacctggcccagtggtttgtagccctagctacacattagaatcacgggggaagctttgaaaaatattgatatccaggccccatcctctagagatttgtattcagttggtctggagtgaagcccgggcttctgcattttttttccagtgaacaaggttgaaatccaatgaagcacaaatgtatcatgccccttcttgtgcccaatgtgtcaaaatatccattcaccatcaaacaaccacacttgggggtgtttgtttttttttttcatgcttaagacgggcagttatcttaactcttttctttgaagttccatggagtggtgatgtggtttggctgtgcacccccccaaatctcatcttgagctgtagctcccataatccctacgtgttgtaggagggacctggtgggaggtaattgagtcatgggggtgggtttttccccaccactatcatgttctcatgatagtgaataagtctcaggagatctgatggttctataaaagggcagtttccctgcacatgctttcttgcctgctgccatgtcagatgtgactttgctcctccttcgccttccgcaatgactgaggcctccccagccatgtgaaactgtgagtccattaaacctctttctttacaaattacccagtcttgggtatgtctttattaggagcatgaggacagactaatataagtggtttgaatggtggtcccccaaaatatatgtgaatgtcctggattctttgaatgtgaccttatttggaaaaagagtctttattaatataactaagtaaagtcaggcagcttgagataagatcatcctggattacccagatgggtcttaaatctaatgacaaatgctcttataagagacagaaaatgataagacagagacacagagaagggggtatagccatgtgaagatggtggcagaggttggagtgatgtggccacaagccaaggaatgcctgcagcctttggaagatgggagaggcaaggaagtctcctcccctagagcctctgcagggagcgcagccctgctgacaccttgatttcagaaatctgccctccagaatcatgagaaaataaacttcagttgttttaagtcaccaagtttatggtaaattattacagcagccacaggaaacaaaatatatcctattgaatcccttttcctttatgcatcctttccttggtgcttttccagatgtcttggctatttttccagaataaagtttacgaaatttccattttttttttctgatttctacacatccctcttgacagatgcatactggtgcaacaacttgcacacagcagcagctgatgcaaacccatggctgtagccctgttgaagatcctatctaactggagtctttgtagtactaagttgatgctttaggttacagagagaagtgatggcagtagagctaggaaatagggagagggaaactctagggcatgaggctagagccagaacaaattttatgggccaaacgcatgatttgcagctgtttatgagaaaggatccttgtgcattgccttgggggaagggcaggggcatgttggaactttagagcctgagaatgttctaggtcttcagagtctgagaaaactttaggtcttctttcttggtaaatccctcgcagtgtcttatgtagaaaaatagctcctcctactaaaatgggcagaagcagagcggagcagaggtgggtgtgtcacaacacaatatttctaagtatttactggcattgagtgagggctcacattaaccatgaacgtcatgcctgggacacctggagaaaatgatgtgaaggacaaggggagtcccagctgggtcttgtgccaaagaatggtggaagaaggggaacccaggtggatccaaggaacagatctgggggaccttgaacaggaagtctagaaacaacagaggccaagaagaatggggagtagtcaggtcagtcatggccagctggggagggctcagacctctcctcccctcttcccacaccagggagatgccacaccagagaaagatggctctgctgatattgggttattttttaaaataaacttttaattttagaataatttgagatttgtggaattgttgtgaagatagcctagaatttctatgtgccccacattccctcttattaatattttacatgttcactaattaacattagtatgatacatttgtcacaattaatgaacagatattaaggcattatttttaattaaagtcaaccctttgttcagatttccttagtttttctctaatatctcttttctgtcccaggattctatcctggatgccacattgcatttaattattgtgaattcttaggctccccttggttgtgagagtttctcagattttctttgtgatgactttcacagttttaagaagtactggtcaggtatcttgtagcctgttcctcagctgacatttgtctgatgttgttctcatgattagactaaggttattgtatttggggaggaagaccacagaagtaaaataccattctcattacatcatgtcagatgtacagactatcaacatgatttatcactgctgattttaaccttgaccacatggttgaggcagtgtttttttcatatttgcacattgtaaagttactctttttctcccctttccattttgcactctttggaaggaagtcattatgtacagcccacacttaaggagtggagaactgtttgccttcttgaggtgtactccaccctacggaaattatttggaattcttctgcacaagagatttactcattctcccccgtgtattgatctgggcacttatttatattagtatgatctcactgatatttattttatacattgggttatcatccaatactactttctaattttgttgctcaaattgttccacctttggccattgagagctctttcggttagttcctgtgtccctttgacatagaaatgtggggtttttgttcttgcttttgtcttgagcactttcttacttttttggccctacaagatgtcccaggattattttgtaggtatctttcttgctccagtcctagaagcagccagttctctaaggaggcctggttccttttattggagaatgctattagaaaccaagatctaggtggtaggtgtgctcgttgcaactaagtggtcattgaatctaggccccctcaactgacagagtaaggatatatgtatgtgtggtatactaacttgtgtatttacacatatcttaaatatttttatatgtaactacttgtatctatattaagccaaatatgtgttcatactgatgtctccgactctaatctattactacatagatcattctagcctctttccctttcctgtctgtaacctcccactctaacattaagaaacctagcttttaccatctgctatccatttacttaattgttcagtttcagtatgcatatataatgatttcaaagttgttaactgtaccctcatgggaaacgactttatcagctagagtacagttctgggcttatgtacagttccttaaccttcagtcttacagactccactcacttccaaagttactgtaccttattcctctacattctgcatttcatcctgggatcttctgtcttctaaaatgattttatcccagcttcaattgaaaaataccaaagaaggaattacacttgcaccagcccttgtagttagaataatttggtactttgatcatcagggactgtgttggttgccctgttctgtgctgagagatggtgttgggttgctgggattgtctctctgtccataatcatatgactggtatggaagagaagaaggtcccacaaaggaaatggggtgcaggacagacaaaacaacagatgcccacagtattccacttcttagtcctacagcacacatgcacacatccatcttcccacatttatagctagaaacctagcctttcctaatgaaatttatatgtcttctcttcccaaaggcagtcaagttaaaatccgcatagttactatatgcagctgcaagtccaggagccctgagtgatatgttttgttctcacctagatttgaatgtggctcttcagggtcaggcaaattcctgcccaaaagtatttggattctaacaaagaagaaaaaacagagtaatatttaaccaaagttataaatttttaatagaagaatagcaagaggattttcttgatcagtaaatatttgtacttttgtaatttttttcatataatgctgtgtagatacttaatgactctatccatgttttagcctgggtctgtggagaaggcagacagtgaaagatatggattcatgtgttctggagacatcagtttctaccctcagcattgcttaatgtgtgttctaattttgtttgcatacaggtttcatttctcagtgctaattgaaattcaaataagtatcttttgtattctcatgatagtttcatttagtaatcactttgtgtctgtcaagaattttatgtatgttcttctttaactccattaatcttagctgaatttcaaagcattgtaattaaattgtatcaaattgtttactttgaaaccctttttaaaatgtcaatggactggaattaaattctattaattggtacagagtgcctgcaaaggcagaatgagttgcaatatgtgaccattgctaatatgatgagaccagagttgacattaataaaagaactgtaataatttaccatctgcttgatcagctgatgcttcttagcatatcataaaagactacagaaagaagaaagctattttcagttgatgaaaggtaatgatgctgtgattccaagcagaacctctcagtagttgcatctttatcacttccattcttttaagaattctgctatatatcacacacacacacacacacacacacacacacacacagtttccaagttcctcaaatggtagaatattttaaatatttccatttaacaaatcaatgtttttaacatgaaaatccaagttgaatataattgtgccacccacaaaaatgatagggtttaaaaaaagtgggatttcatagatattataggttatgtagaccaatattaggacataagtttaaaatctgctgaatgaacatcatcttctctcatttctatcaatgtattgctatgactgggtatatgagctcatttggagataatgtcaaaagtttcaatttaagactgtttatgaatgtgggaccctgccctctgctacctggctttctggcctccccataacagataactctgattagtagtgcttcacagctcaaaaatcttcagtaactccttagtcttccacctatgttcttccacactttggttatcacttgcccatttcccttatttctcatcaattattttccttttactcctattctttcctctgcctgggaacctcttcccagttttgtctagcagtttctgagggcagtgaccctgtctggcttatggcatagctcataagtggttataatgtttccgtagatatttgccaacaaatgaacaactatttacattctacccatttttcaaaaccaggctcaaataataccacttctaaaaagatctctctgattcttcatctggaactaacctctatgtccatatgttgtgatctagaactccttttgttatagcactttttacatatggacatcgtctgctaataatctctacttacacatcttctagaacatggggtaatatagaaagtccttcctctttccataaaaagaaatcaccagccaatcttatgtttgccccacatatttgctgctttttttccccacaaatgacaatatgactcttttcctaccaaaatttaccccctctacgtgtgttctagaacctaccttttcttcttctgataaggtacttgctccctgtagctcctctaacatcaatctatcagtcttcttctctttacagaatcattttcaccagcactcaaatgtgttctaatatttcccttcttaacaaataattcctgttgatgtcatatactttaggaatcaccatcacattctctttcctccctttcatagcaaaacttcttgagttgctcatggtacctgtttctcgtcctcatcttttattctctcctcatcccagttagactgggtttataaccccaccagctcactgaggttgtttctactgaggccaccagattgacctctatgttgcaagaccccacggtcatttttatgtctatatttattcaaggtctcagaggcatttaacatagtgttgataacttcaattttttttgaaatattcttttacgttgactttcatgacaccacactcaccagattttacttcttagttgctcaccagtagtggagataaaatgaatcataaagaattctcaattaattcaaaagaaggaagtaaaataggggaaaggggagtgaagaatagagaggacatatagaaaacaaatagaaagatggtatactggaatactaccatatggataattaaattagatacaaatggtctaaacatcccaattaaaaggcagattgtcagattggatagcaagaccccattatacgatgcctgcaaaaaactatatgaagacacagatagattaaaagttaaaggatataaaatatatactctattaacactaatccaaagaaagcagaattgtccatattagttttagacaaagtagactcagaacaaggactattacagggatgaaaaaggagagttcataaagaaaaagtgatcaatttataaggaatacaaaacaattttaaatgtatattcatcaataacagagcttcaaaatacatgaagcaaaaactaacataactgaaaggataaatggacaaattcacaattatagttgaagatatcaacactcttttctctaattgataggagaggaaaatcaacaggcatatgtaagactagaacaatatatgaacaatgtgatataattgacatttatagaaagctccccatgatgaaaacagaacactcattcttttaattttcatatggacattcattaagttcatatgctaaagcataaaacaagtctcaataatttaaaagacatgaaataatacggaatgtgttctctagtgataatggaactaaattagaagtctatcacagagattgcccacagagaacatgcaaaaggacagaaaatatggcccaagattaaaacttgggagaataccaacgtagtggtagtagaggaagagctcttcaaagaaggccaatgagaagagatcaaagaagaataaggagaaccgggaaagaggagccatggagataaagggaacagagaatttcaaggaacaacaatgttatatctagaggtgtccaataagataaggattgaaataaatccattggatttggagacatggagattactggtgactttagcaagtgaacaattgatgggaaatgaggaagtaaaggcagtgagtatctattcctcttccaggcaaatctcttttcttcttgggaaagcaaaaaacatgaaagcaaggcagtggctggagagaatcagggccagaggagggaatttttttcttttttcttaattaatttgttgttattttaaagataagagagatttggacatgtttgtaggctgaatattaagagctggtggtaaaagacagttgaagatacaggaaaggagttacttgttggaacaatgttcccaaggaggtgggaaagaatggacttattactgtagatgggggattcatcttgaatacagatatgaggggcaacaatataaggacgagtctaaatgtagatgaatttgtaggtggccatggaaattgctcacacaaagcaccttcatggattcatcttttacctttatgctgactcccaaaatgtattccttctcttagctcttgagctccagattcaacttccagtttgtacttatcatgtacaaaaacaagcttgtattctccccaagttcccttcctgactccttgttcttccttttgttcccttttgacacagacaactggaaccttgagttagccttctgtgtggcacattctagcctttgtccagatgaaaagttgagtttcacttgtcaaaactgcagagcgtggagtgggctgcaatgtaggtgatggggtggagagtggataatagaaaatgggttttgagatgatgaaaatcagagatggccaggctacctgagggtgtcatccattcacagaggtgagacaggtaggagattctaggtagaaaaacagcaaaatgaaattctgtgagattaaaaaagagtaaagagtttggaaggtgggaagcaggcccttgagaaaactctgagctggtagaattctggatataagccccgtccatggtgttcctttgaacttgatcatgagcttggatggaatcactgaaagcaccaaactgatatggactccccaaatctactgaggcttccagcattcttccagaatccggatttgaactgtgggttttccttttgtggttctttttccatctttcatccccatcccagtaagattcatttttgagtgctagatattcttcctctgcaatgtctctctactctggcctccaaatcatacatctcccctttttttctcctcttgccaaccgctgtctagattccttgcaccttctgtttctagtcagtttagaaatgttaaaaaaaaaagcttttctcatagtttttctactcttggcagagtagacctggccagaagccagtagtagcaatgtgcatgaagattttatatatatatatatatatatatgtaataatgaagtgaaacactgatccaaccttggaaaataacttccctaaaaatttaaatttataatctaggccaagatgttgattgctgtttattttctctgagccagacatagtggctacaagttgcttggctgtccaaaggttctcacaaggcatgatagccatgcctcaggccccctgcagagtagatttaattagggtaaatgatactcatgttttggcctggagacctttgctgtggtccatttgccccaccgtgaggttgggaatcacccatgctgggccactcatgtgcttctgtcagttaactctgaatttcacacatgcttagttgcgtgaaccctcagaaaagtgacctctttcttccttcatcttgaccacctgggatcacctgtggttttgagacactgtgtttataccattcacaagttggccatcccttgtctcttcgacattattaagtttttcaaggacaaaccctccattttgtggtagatacagctgctttcgacaaagaagagtctggaaacagggtcttgtcaaaattcagttcagatgtgtggctgtgtttactctagctttggtcaggtggcagcaatatgtctgttgagaacaacggagctaccagtcatgtcagcacccactcctaggcccctgctcacataattaaactattcattcaccctcatatcctcacactcaagaaatgtaaaagcccattggggcatttgttaataatggctctttctgggtcctactgtaaaggaagaggtgtctccgattatcatgtgaggagaagaagccacgacatgtgctgtcactgaagccatgagaggtggggaagatggcaacacggctggcccctctcagcccacctgagactgagctgggtagggtgggcgacatgggaggcaggcagcttagaggcttgcaggaggcagcttagaggctggtaacacagtggtgcattggttcctgttgattgtcccagacctgggtgtgactgaggtagaagaaagacacagccctgggtccctgactccttctgttctgggatttcccctgatagtggttattaccaggtaccacctcttctaggggagtgtttggaaatgtgaaaggggcattttagttaccatgtgcgggcactggcatgacaggctgagcatagaggctaaaactcagcgagacccagtatagtggcaccaacaggaaatcctcctgctgggatgtgtccctttgagaaacatgcagatctcaaggcctcccaaggaggacagactctgaggcaggtctgaatttaaacatggcgtctcgcccctgcctttgcctgactgaagggcattctctgtgggggcacagagctctctgcagctgaaaagaaggcctacggctcagcatttcaggagtgggcactgctccagtattagctaggaacacaaagtgcctgtagaggtttgaaaaagactgcaggcactggcaaaacaagcccccgcaggtgatgagacccatccttcactgtcaccagagcaaagaatgtagttcagttacttccctaagaggagcacgaggttctctggcaggattcaagatgagactggtgttagagggatggatgggaaacagtattagtttactacaccacccctgacccccagaaaacaaaggtatccccagagatagaagttcattcagcttctagaaggctctaaatgtttgcacaacttggttcttctctcccaggcactaacctctactcctgcccagttgttggtctgtcagtctctttcctcgaaccagagcaataacattttgacagtgtttagagccaagcttggaaacaaaggtagacaagtttctggcttcactttctgaatttctttctctttccctcgcgcaaggtaagagcagagcctgccaacagtttgctaattgtctccaagtgaaaagattgtttaattcagaagagattttagactcccaggggcatgacacccgtcatttcacaatggagaattatttttgtggtatttattttatgattcctgacccttgttctagatcttgctggtgtgttttcatttaaaatgtattaactgagacttggcataggcacttggctccattaagctctacaacagcttaatccagattttattatattgggacttgagtatacaaactttaagatgagaggaagcttaaggataaatagagtaattttaatacttactatgcatttaactcttttggttccctctaggcaattttctggagtgtttgtgactggactttaacatttccaaaatgtggcgacagtgactgttaagtcttcccaaagacgagggttcctgggagccccagggtaagtggcagactaaggtgagcatttagggtcatgattgctttaggtcaacagccatgcattgggcctgtctagtggatgcagagccctgccaggcatcacggagaaggcagccttgactctcctctgggctccaggacattaatatttaactgcctccttgccagctctgtttgctgctctcccaaactcctcaacattaacacttccaaagtggatctcctgaccttcccctcaaacctgaccctccagtgtattccccttacaaaaacaaaatcactgtccacctattttagttgctcctgcagtaatatctcctgcactacaaccagagcctgttggctcctccttctcagtatgtctgcaatctgtctacttctctccatctcaactgccctgccaggtccagcaccaacagttctcacctagagtctcccactccccattagcctcctacctgtcttctcacatccatttgtggcctccacttctgcagctagagtgatctcctctaagtagaaaccaaatcagcctacaaccttgccccaaacccatcaatggattcccactgcacttggcttaaaatggaagtgttcacacttcctgaagaccctgtggatctacccctctttaccttccagctccttgcatgcccttgtctccacttcttactgggctcagtcagaccccaccagtccccaaatcattccctggctaaggctccttcatctttcaggctatttcctctgtgaggcctttcctgatcccctcctaacctaactgaggcctctgttatactctttcatagcaccctgtgcttcttttccaacctccatggttcttctttcccacacacaaaccctctactcctgcccagttgttggtctgtcagtctcctgtacaatcacggtgtgtacttttatatttattgttgtaattgtgaatttaacacctgtcccttccatcagactctaagttccttaaaggtcgaggccctatctgttttgctcagaactagaaattcagcaactggaacagtgcctggtacatcctcaataaatattggttgaatccataaatttaaaaatggaatggttactgctttcaaggagttgatgatcactgcccccaggaaaaacccactgagcctcacccatgtccactctagataaggagaaaaataaatatctgaaaaaactcaagaactgctcaaagcattgtgaaataaagtgaaaatccatatcttggaaaatccagaggacttatccaaagtctggtgagtctaaccatgttaaggtcatggactggcggcaggtggggagagaggtacctttctcagaatgatcttttcatccataaccacaaatttcagagagctgagaaaagggctgagtggagagggaatccacagaaatgtgggtgttggccacctagctaggtcctcttctgggtcctgttggaagtcctcttgttaatccattaaggtctatgcattcgtggttccaggcatcctgctggggaaacccccaaccacaccctccaaggagatgcgggtctgctctcatttcctgtcctctccagatttctggagcccccaggttgagtgtcatgggggaactccatggatactcagcagctactggtaggaagtccttcttcgtctccagctgactgctggagctgagctcctttgggctgggctccttttccaggaggtaaaataaaatgtgcttacttgttcctagctgcaattgtttaattgacttgttttcaagttttcatgtgggcctagagagctcgtatgtgaaggaaacttttaataatgggtttgaaaacaatagtttatagaaaattagaaagaaaaatataaagattgatgagggccttttgcttcatggctgctggcttattctaaagggattcaaagagttcacactttagggccatatctgtctgcttttcccaagagcaaatacgatgccacaaatttaggatggtggtttgtgctatagactgaatgtttgtatctccccaaatgtttgtgttgaagccctaactctcagtgtaatggtctttggaggtggggcttttgttgggggtgattaggtcatgaaggtgaccctcatgaatggaattagtgcccttatgagaagagactctggagggtgctctttctccttcctccatgtgaggacacaaggaggggttggcagtttgcagcctggaagacagccctccctaggacgagaccagactgtcacaccaatcttagacttccagcctccagaactgtgcaaaataaatgtctgttgttcataagctacccagtccgtgacactttgttacagtaacccaaaaggactaagacagtttgtaaaacactaaagggagagaaccaggtattccaaaaagatgcacaaagtctttttttggtcaacatttttagtaatgagctattcagggcaaagcttgacaagctaatggagaatctagataggcccctggaggcccaggccttggcttaatccccccagggcccacactgaataacaggataaacagaagtaaacagaataaacttttccccagccagctcccaggagggcagcacatctccactagcttcttgagcacctttttgttatgttatgctgctgaaaactgaaagggaattgctatggtgtggatactagtccccttcaaacctgatgttaaaatttgacccccagtgttggaggtggatcctaatgggaggtgtttgggtcatggaggtggatcccttgtgaacaggttaataccctcccctgggggtaagtgagttctttctctgttagttccctcaagagctggctattgaaacatgcctggcaccttcccccttgcttgccgtctggccatgtgatctctgcacaacaggctccactttgccttctgctatgagtggaaacagcctgaggcccttgccagaagtagagcagatgctggtgccatgcttcttgtatagcctgcagaaccatgagctaaataaacctttctttataatttacccaatctcaggaattcctttatagcaacactgaacagaagaagacaagaatattctcaagagctcttctagcctgactcacttcaaaaaggaagtgaagaataagaaacaccttgtatagttggatccaaagaggttaagtgtgtgacttttggcaaggtcacacagctagcaaacagcagagctgatgctagaacctggccactttgaaaccagacctgtgttcttaactcctacgtcatatcctgccaccagtctaccgtccatggtcctcagtatttggtgttatggttcagtgtttcattgttgtgaaatcccctattgtttctcttcttttccaactactccccacttcccacaactccctaacagtccaatatgaaataaaactggagtagctttccttttagagaatgttctaacctctcagtcttccaccccacctccctccctgcccatcataacagtaattggagacatgctggactgtacatgtgcatgaattgagaggtcttgacaccaaggttgagaaactaaagcatttagaacttcatgactgttcctcacacaagacaattccctttcatttgttgtgcaaaaatgtgcctgaaacatggaacataatcttccctattcccagagatactatgctggccttctgttagcagcattattttctttggagcatcaaatacgtatacagaaggatttaattatgttttagcaaatctcagtgagaaagatctagtacaaaaagtctatctcatttcaagtaaaggccatatgcaaaaattttatccaattttaagtcatacaatcttattatattttaagtggttttataagttgcttaaaatgttttggacaaaatggtaggctgtttaagtaataaaatatatgcgtgcacgcacacacaaatctgaattcactgagagcaaatctataaagggtaaggatactggaattgagaacacagaactagaacctaaaataatatttcttcttgtactagtgataaaagaatatgtgctattttcccactgaaacaaaagtaatgttaattacggagccacatataatgtgaaatgtgatcgtgcttgtgatctgcctaagtcactactctactttcaaggtaggaggatgaaaattctcaatccctttccctctccatctgctgcatgtattctgtgagagtgtcaagaacgatttgatgtctcacagttgtgtttctccctctggtgctgctctgtgcgttccctgagaggaagccacctgcttactgtcttctctaactgtagggttcacccagctacctccctttcccgagagttcaaatgggtagattcacaaatggcacagatggagaaacaaattaactttagtacagatgctggcatcgatattcctgggattgaactgcttccaagccagaaataatcctcaagctttcaaaactggaaaatcagatgcaatttactctccttgtcagatggctggatgtggtacaatgcccactggaaagaccaatgggaaaagtgtgagccattcaggtggcttggatatgaatagctttaaaattaggcacactattgtgtcactaggattttctactaagctatcagatgatttttttttgaatttgaaatatggacaactgattggattctgagcccaaaacgaattgtctctaaaagccaattggtttatgcatttattcaataaacacttattgcatatatgctaggtgatatagggcaacgagaagtaagacatgatccttacactcactgcacagtgactcatgtgggagatgagtgtggacacagatggctatgctaccttttgataatgtgctgtgattgtccccacctggggaggaagggcagtttcctggctgttaggagcttaattgtgggtccccctcaaatttatatgatgaagcctcaatccacagcacctgagactgtaactatatttggagatagagccttgaataaggcaattaagttaaaatgagatggttggggtgggcccttatcccatctgactggtatccttacaagaagaggaaatttgaacacatgaagagacagcaggggtgtgaacacacagaggaaaaagaccatgtgaggacatagtgagaaggcggccatctgcaaaccaaggagagagacctcggaagagaccaaccctggcaacaccttgatcttgatttccagactccagaagtgtgagacaatacatttctgctgtctaggccacctggtctgtcgtattttgttacggaagcttgagcagactgatacacctggactcacccccctccatctcattacctattgctttattttatttttgtttcagtatgtgttgctatttgaaattatggtgtttctattccatttctttccagtagaataccaactccacaagggcagggacttagctttattcaccactcattcccagtctctggaatagtggaatagtgcctagcacattgtaggtgctcaacaaaaaggtgttatgagcaaagggttgtggcagtggcaaggagggggagatttcctggggcaaaaggatggtggtgtgggctggagggaagaagccttccctaagaagaggcgtctggatggttgagtctcgccgggcagagaaagtgaagcaaacgcatccctggaagaagagacaacgtgagcaaaagctcaaaggtgtgaaaatgacgtcagatggaaaagtaggtcactgagacgggattttaggtgagccgggggtggggcaggagaggaaacttcagggagaaaggttgggccagattatgaaaaggtctagctcctgtacaaagtgaaaaatgatgtggattcaccaagctgtcagaaggataatggcatcctttctgtgactatatggaatacatacatctattctactataagggatttatttatatctatattccatatagtcacatatagtatatatttacatctatattccaaatagtcacatatatagtatatatgtgtaactatatagtatatatgtatacatgtaaataaactgtctgtgtgtgcactgtgtgcacatgtgcctgtgtgtgtacaatacatgttcactgagcatttcacacacggtaaataactagggaaattagttcccttgtcatagtatgtcaaggaatttatcctacagtgcttaaaggaccccatgaggtatttaacaagcggaggggataattttgaaaagcaccagagaaaatacggaggacggatcaggcaagaacctgtaacaggaaggccaggtcaggggtgggaagtcacaggtgctaatgcccaacttaaggcaatgccaatttggagaggcaggaaagcctccattcaagggatattgagccagtcgaggcataggtcttagtatccatgcagatgtagggagtaaaggagaaaggaaccaaggatgtctttaaaatgccttgcctttcaccatgtttattgtcattgacattataagatatatctggtctttgtttgcttgtttgttttgttaactgccttcttgaggcctttggtgacttttctctctattgtatttcatgaatacatggctaaaactgtacctagctgatattaaatatgcaatcagtatttacgactgaattaatgaatgagtggaaatgttctttgacctagataaggaatgcaggagaaatatcaagtttgggtaaagaggtatgaaagaaagcagaaaaataaagatccaggaggtgacgcccatgggccattttgcacctggagacaagtcaggtttttggctgcagatgctagaatcatgttggagtcgttaatatgttgttggtagatgtgaatgagatcactcagggaagagacccaggtggagaatgagaatatgcaggagactgaggcaggaggattgtttgagcctaggagttgcaggttgcagtgagctgtgatggcaccacgctccagcctgtgtgacagagtgagaccctggctcagcaaataaaaagaatgaaaattgggtgcacacaaatatgcaaagggggttaaaggagagagatggaaccaaggcaggagatgaagaagacttgctggaagtatcaaaggaaaaccaccacagcatgctgccctaaaccataggaggagaacacttcaaggagggcagtgtcaaatgaccatgaaatcctgtgacacaatagttttatgatccaaattttgatggagagatgcagtggtgtgttagagctatgtgctagggccggctttcaagagctgattattaacttttcaggaatttcatgagctattattaaataaaattttgtaattcgttacaattaaattttgattagattaaaattaaattttataagcttacaattaaatacattgtattaaaaacaatgataataaatattcaaaactcctcattttctaatgattttatttcattttactattatctatactttattgtccctgtgtgtaaatactacatgatgcttgtgctgttgattacgcacctcttctcctctgtattcggtgatgtcatgttggtagcttgaactcaaccatgataggagtatttaaaccacggcaattggcaaaggctgtaagtcagagctcttctttccagagagctggttgttaaacatttactggcacaccactgtccgaagggaaaaggaaagatccagtgtaagtttcatttagattaaggacaacggagtaagaagccactggagatggcagtggaggagctagcgacagatggaaccctgatgaagcaggactcagaggaggtggtgggctgagtcccagagcctggacgtagggagggctcattgtacacagatatggcagaagttccatctaagtatgtaacaaaataatgagactttttagtcatacactcagagaatatttggtcttccatttagtccactgcccttagtaacattttaaaattccctttaaaaatttgtctttgactgtatgaccatattgccatctcggcgagacagaccagcagcctgtttatctcacgtaaaccctcttccttagcaaattgttggacaggcaattcttttttgtgttccttgcacctcaagataattgtggcaggctagactgcttcaatatgggcaatttcaatggaatatctgcagatccaatttacatggcactaaatagtttcataagtacctaggacaagttaaaagagggaactttttctcaaccttttaaagcctcgcttttgataaacatacaaagctcacattctttaaaaatattatttgagcttcaaattcaactatacataatcacacacacacacacacacacacacacaattgggcgaaacactacactgtttttaaattatgcatgcctccaccttctagcattgcctctcccttctcaggagagtgtgcagcctacaagttgagaatagtaggatttataaactaagcaatgaaggtcaaacaggcccatctaaaaggcaagtgaaataaaagctgaggaattgcagtaactgaactgctacatccccagttctttacatcacacactctcctatggaggcaggaaatgctgtctttcactctgtgcattgctatgttttctcctcttgccatttaaaatgattttgcatgatactcctcagattgcataatcatctctataactgtcattcctagtgaccacttaatattccattatattaatagagtacagtctgcctaagccatttcctcacagttgggtacctgggctgtttctaattattcattttactatatgggagggctcaacacatctttttacagatatttttgtttccttggaattattccttgggacatgtttctccaatagccctactaggtcaaagagtaggataatttttatgacatgtcacatattgcaaaattgctcttgaaatgatttcttttttcaatttatggtgccgccagcaaagttgagtgtgtcttcttccccaaagccctgtcaacaaacaattttgtcatttttattcatttcccctgttgttctcctgattgtagcacaatccatgtagctaaggagatgcaatcagggaaaaaaatcttcccctaattaaagcctggtgcagcaatatgtgggtggttttaatatatatcataaagagttaagaaacattctatcattcaagaacaaaaatgaaaaaaacatagggtttttttgggttgtccttataaagggttaggaacaaaagaaagaacatacataagactacacaaacagggaaatgatgagaagcattgtataaaataaaacaagaatgtaaatattcttgctttattttcagcacttcatgaagcaaaagcattactggaattactaaatctgaaaaagctaagctgtagagtaagccttgtctttgttatttctgttaaatatgttaaattaaacacgatatatggggtattatctttctctccatttggcttgaaatctgctttctctctcaatagacataatccaaaataagagcaatgaaagcgctattgaactggattttgcatttttaagagtgttcattatttatatagtaatccctaaagacctcgtgtggtacctctggtgtttgtaacggacaatggatgtatacagcacattccttcaagaggactgctgtattcatactttattatttttggacatttaaaaaagatttcctctaaaggaacgagacttgtgtttttaggtttcatggagaattttctaaaaggaaacaactgcaatcaaggtagctaccagattatttcacaaattgcaattttatattcctagggtagaaaaaatatctctaaggctgcatatattgtactctccttttagttgcttattagacttttaacttctatgatctcaagcttttaaattgttgactattgagaagtttctggaacacgtttagtgcggcgagatttcccaacacacatttttactgactgggtgcccctccttggaacaaagagcctgtgcctccatagcacagtgaggtacaacattgaggcaccttccaggtaacccaggccagaagaacagcttctgccccaagtagtggacttggtttatcttcatgaggtggaattaaattccattactttttctctgatgttcaggtcagctccttctcttgacagcaactctccatattgggagtgtttatgccttggaaattggcaaatgctactaatcaagtccttcacccaccaagagagggttgctgaacgtttaccagcacaccgctgtaaattccattactctttctttctgagaaatgacttatttttctctgttttagcctagctaacatccctgtctgagagaggagaacttatttttccctattttagcttagccaacaaccctaatgcattggacatacacttccctttgggaaatggccccatcttggtctctgagaccttttctctagttcttctaccctctggggacttcttatctggaaacatttgtggctcttcttcctcctgccttcagatgccagtgtgtgccaagcttaagccttcttttctgtgtgtctttctccagagagctcatgcatctcaaggcttctgccagctctggactgaaaccccaaaatggacatttccaatcacattcctctcccacaggctccaaccttgtatctcctgacagttgtccacagtgtcactgctgtagacctttcccctggtgcatctccctggccattgcctcccatgcagcagatttgagaactcatcttccttcccaggatgttcaggtcagctccttctctcagcagcaactcccctctcagccaaccagacttacctcctgcacctttaatgggcccttctctgaattcccaaagctgggtgccatattgtgctgggtttacttaaagatatccctcatgttagtctccccatctccacccaatctgtcaccccaattttaagctcctcttcctgccccgcctttgagtgcacactccttccccagtctgtcctgtgcacccccctccagcttcctgaaacatcatggcagctccatgcttgggggctctcaatcctactacattccctctacaccaggttccttgtctttcttggtctttatgatctggctctatgaagtgaatgttatttccctcaaacctcctgcatgaatcattcccgtgggacggttttcctgttttgaatctgggccataatcatgtgcaggaactctctctcatacaggctctcaagagcctgtgctaaaattttcaggaagcttgtgagccagttggtaaacacagttgtcattatacagtaaatgatataaacttacaattaaataaattaggtttaaaaagttaataaatacttaaaactcatagcttccaaatagttttaccattatctgtgctcctgagatcatgcacggctgttgtatcttaatggtggaaatactctatgatggtttgctaatgcccatcccttccaactacccattccgtgatgtcatgctggtcacttgagattagccatattgggagtgtttatgccttggaaattggcaaatgctactaatcaagtccctcacccaccaagagagggttgctgaacctttaccggcacactgctgtactatgcatgccttatacatatcctgtctctgggattttgttctttttttcctcctatcaggcatagcttcacctttttccttgacataatatttttactgatctattaatatccagttaagtctctccttttccatgacacttcctctaacggtagtcactttaattggtctgttttccatccaaacccctttattgtttatatcatgaaccacaaaacctagcccttcatagtatgtttcccattaattcgttttaaatgattgatccaatctctcgttatttcattacgtttcttatagtgagtgacatgcccagtgctggttgcagttctggcccaaaccatttattactatttcacatatttggggggtttctgcaaatacacttataaaccatgggaagccaccaatcactgtacttcaacatcgcttttgggccctagcacaatgctgagccactaacaggagatgagcatatatttgtaaatcgacatgaagctccgtaaataccaggtgcttaaggaacagtgatggtgactatggctgaatttcagaaagaatgcattcattcaagttgctcaaatattttgtctcaagtgctcaagtttcaaccccaaacctagcacagggggaggaggagagacttagggaattcttgggagagttgagttcaatgccctgtggtcaggtcacactagtcctcagctccattcttcagtctttgtatccaggtggtgctatttgtcctgcttactgacttggttgacagaaaagtatgtaaaagtgcttgtaaagtgctcttctaatatacagaccaaggacccgaatagccgcatccttcaccatatttatgctatgttcttcctccagtcatctgtaagcaaggataaaaggactagtttgtatcgattacacacgtttttcctctttctttcttgagttaaggaagcagaaagccaggattgatatataaaatggtgactagaaaagacagaagcctgggcctgttgtagttatcagtattaagtagtcatagacccacctctgaaggttgattgtgtccaaaaattcctccataaatacagcacccacagctgcttaattttgatgcatttggccatcctgtgtggagagtagggcagatattatttttattcctattttttggtcaaggaaactaaggctgaagaggttcaatgactttctgaaacttgcatggccatcgagtggccgaagcaggatgagaacctaggtccagcacaaatatacagatacctgttgtctcactctaaaccattcagcaatatcactcaactttccatctttctatgaagatttaggtccaattgcctctttgcgacacagtgtaaagaactctctttgggagtcacctgggtttctttggagcatctcacactaccttggtgtgccctagaggctgacacatctgtcaaaggagatgactgcacttgttgtacccacctcatggggctttgagaggataaaaggagctagtaggtgtgatagtcctttgaaaactaagttgccgcaggcatacaggacaacataagaaataacaatagttctgtctctttgaagtggctcctagagaagttggtgaatgaaaaagttccaagtgcattgtacttgtgctctgttctctttggttttccctgaattttcgtgactgcatcgtccatacaaagggcattgagaaatccacacagttgtgttccttttttaatttaattttatttttttgagacagtttcgctcttgttacctaggctggagtgcaatgacgtgatctcggctcactgcaacctctgcctcctgggttcaagcaattttcctgccttagcctcccgagtagctgggattacaggtgcccgccaccatgcccagctaatttttgtatttttagtagagacggggtttcaccatgttggtcaggctggtctcaaactcctgaccttaggggatccacccactttggcctcccaaagtgctgggattacaggcatgagccaccacatctggcctgtgttctctcctttgcagagtctttaagacagttgtggcagtttgtctgaacaccttttcatcatgtggcaaaagagatcagccataaattggtaactttgtacaactgttaagtcaagccccatttgtcatttctgacattgaaaagacatcatattgtccctcaagttcctgtcatagtcataagtacccgattctcgttgtggtggggtcatatgactgttgtaggttctgactagacagtttgagaagtaggagaggcagagatgagtaatcattccatggagacaccagatggggcaggctttgggcctctggtgaacccattctcatccaccaaagtgttcatgtagttctgagaacaggagcaaataagggtgaggacaggcatttgactgagtctcagtaataggtatatgaaacggggataggattttttgtttttttggttgtttgctttttgtttttgcaaactactcatgtgcttttccctttggcatttttgtgggcagaacttccccccagttctccttatgcagtttgagccatctgttgcccctcagggaggttgggaaataatcggaattgttatgtcaggatgcacagagaaaggaagtttatgacatcgaaaatagaattttgcaggaagacaatagtcttgaaatccagattttttagagaggaagaggattttcaaaatgtattaacattttaaaacccagaactggaagactcatattctaaaatttttccataattatggaagagacagacttcagcctgtggcaagtaggctttgaggcttgttgctcctgggcaggggaaagctgtgatctatgagaagagcttgaaggccaccctatgtggacctggaattgtgagtgcaaagaagaaacaaaaaggaagacaattgggtcaggatcagggatcttgatcacaaacttgtaacccatggggccaccagaaacatccagatagccatgagaaggccaaaaaatcaagactagtgacgtgccttcacaggtatataaaaatgggcttcaggccgagcatggtggctcacgcctgtaatcctagcacttcaggaggctgaggtgggcggatcacttgaggtcaggagttcgagaccagcctggccaacatggctaaaccccgtctctaataaaaacacacacacacaaaaaattagccggccgtggtggcaggtgcctgtaatcccagctacttgggaggctgaggcaggagaagcacttgaaccatgaaggcagaggttgcagtgagctgagatcatgccattgcactccagcctggacgacagagcaagactccgtctcaaaaaaaaagggggggggggcttcagacctcttggaggacccctgcttttggccacttccatagggcatggaaggattggcagagggctgacagtaaaaagggaggtgagagaccaagccccagccctaatatcccttgtcatcatcacactcccagagttgatggtggagggggactgttggataaactgagaaacaccgtttacgactctagcaggagactgtttcatagcctgtccctgcaccagcctgggcaatacacatcaattcaatgggtcaggcagagggaaaaccagagattagcctctttagatgccttcaatgccagtatggaatggaccaacagaagtgcctgggtgccctcaaagtgtcaggcagaagttgataaggaaatctggctagggaagttttccagtagcggggttcagagatgactccctccctcctcaaaatcatgaaaattccatctttcctccaacactggctgccatattggaaaggaacaaagcaaccacaggaggaaatctgagctgtcctatacaggctattaaaatacgagctaccctaaagggaattgaactttgaataaatagactcaatgtttaaattgaaaggaggcagtttaaattggaaaaaccctgaactattgtcaattggccaatcttagtagctcctactgcccagcaggctagcgtctcatgagaaatatcagatgaagctatagagacaataaagaatagtttctttgaatctctgagttgtaatgtgaataaattcacggtctccatatatttgcattctgtgtctcctctcccccagcaaacattttggatcggattccaccctcctgcaagcttctctgaaaagtggcaactgcctaacctgtgttgctgttcatacttagtgttgtcctaggctaaggtgaaaaaattggctggttatggggctctattggaggtttctattttcccttcgctgacaaaggttagacaggataactgaaagcctcactattagagtcacatattccttcaaggatggaagagaggggaaactttcaacactccctagtccacagaggaggacaccccctgggcatgacacatactcacacacaaatgcatataaagtaaacatgtccaactacataatagtttgcattcacctgtcaagagcatgggctaagggcattcatcccctcaggggatgactttgcaatcttacatggtctttcctactgcaccagaagtagggaacagagtagactttctgaaaagcatcccgacatcatttaggtcttgtggcagctattttgccctctaaactcctacagtgttttcttactagattacttttctatttctcccaaagctgcatgcttgctgctggggaggttatgaccctagccctggctaaactagagtggagacaaagtgacctgtccgccctctctctctcctgggccctggctaggtcaccagaaaggtctggggtaatttcttggcatggctgctcagcaagggctcaaacagcagctgggaattctctacacgatatagactaaatcccgaattcgcttttagctttcacagggctcccaggaacgctgagatagaacaatctgggtttagtccttaggcctaaagtcttaaggtattaaaggtacagtttgttatcagtattcatggtggagcgatactaccatgaggtactacccaggatgctgacataaagagtcccaggtgtgtggttttgaattttaaaatattcttaaaatgtattacatttttaatgcaggattttgatgtttttgtggtaaaatagaaatctctttcaggttatgtacattagtacatgtacaatttttagaacaatgcgtgtcccatagcttgattgatattaataacatctcatccagccttaagatgtttctgcctggattgatgcatggtagtggcttggtgaaatttattgtttccttgcaaggctgggataaatgacttctgggtacaggtatcaacatgcatgaagcacttcctctgtggtcaacctactttccctttggcctcataaatgggaatttgaataaatatttaccgtattgattagtttatgtggggcaggagtcactgagcagtgcaatgagtttaaaatatggccctctagcaaatatttcagaaagggccccttgcccttgattcatatcaaaatatactcagaaaggatccgactctgtctcttgccaaatgcagggtctgtcttggagacttttaggccccttaggagtgtctgccaacaggcagttgtcttcaccaggctgtgaggataccacagcccctccatgtcaccagttctggttaagacagacgggcttgtcttctgcctccgagactcctggatcttagccagattctggagtgagttggggagtaaggctggggtggggtaaggctgcctggggctggaagatgaatggtttcatcagtttcacagaggaggagggagatgggctgcagggcttgcaaaacatcacatcttggcaaaaatactttacaaaacaggagattcctggaaagcaataatgctgacagtggagagccagtttttggttctgatacagaaggggtgctgagtctgagaacaggctggcctctcccgctgtctgcaggcgctattttggccacaggcactgccttcagctcctgctctttctggggcgtgtagctctggggatacaactggaaaactcgcctttgcttgggtcagaacaggcctggaatctggtcattgtacaggctatgccccccacttctgggatcccctcccacttgcccgcagccttccagactgagctcaacggccaccttcccccaagcgtttctcacccgggcctcgggtctgaccctcctctaaatggcaccacaccttgttccatcttgcagtgctttctcacaaatagcagtgcttctcttcaacacagatgtaggtatctttgcccttttagagtagatttcgtgaactcttttggctcttccgttgtgaggatcaaaccaattctcttcaaacagctgcatgcagcctccagcagtctctggtcggtgccttggcccgtctccacatggggccttccacgcagcctcctctgtccgatgagatcacacgtgctccaagcaggcctggactgagcgcttgggtcccgcacatagctagagcactgcaggcacagcaatttctgtcacctggggtgtgtgtgaatcctttgtgagattcttctctgaaggctggggggtcatggctttgagccagggtagctgatcagtaaaaggcgctaggtgatgcccatcgacaagggagatgggggtctaaacaggtgaggaccggagcctgccagctattaatttccaacacttcctcccagtgaattttctaccagagctgtgaaccagaagcaactgacttaactgaactttctgtcttccctaactcactccaactcatgaggaatacggcggtgggtagtctggctctgaggcgaggcgcagaagggcttggatttccactgggtgcatgttatgtggctgtcgtgggctgaactgtgtccctacaaattcatatgtttgaagtcctaatctccaggacgtcagaatgggactgaattcagagatagggtctttaaggaggtaaccaaagttaaatgaggctgttagaatgggccttaatccaatctaactggtgtccttataaaaagagattagggtacagactcacggaggtatgagcatgtgaaaatattaatactagaagcaggtggccatctataagccaaggagagaggcctcagaaggaaaccaacgctgctgacaccttgatccgggacttccgcagcctctagaattgtattaaaaacaaaacaaaaaaacaaaaaactgttgtttggccgggcacggtggctcacacctgtaatcccagcactttgggaagctgagttgggcggatcacaaggtcaggagatcgagaccagcctggccaacgtggtgaaaccctgtctctactaaaaatacaaaaatcagctgggtgcggtggtgtgctcctgtggtcccagctacttgggaggctgaggcaggagaatagcttgaaccggggaggcagagattgcagtgagcctaaatagctccagtgcactccagcttgggcgacagaacaagactccgtctcaaaaaaaaaaaaaaagcaaaaaaacagaaaaaaactgttgtttaagccacccagtgtgtggtacttcattatggcagccctagcagactaatatagtgacataggcatgtgtcaccatgcatagtcctgaatcatcttacatattcacatcttgaaaagtctgtaagcaatacaagtgtcactcatccaaactccggacacttcctctcttggggctgtagagctagcaggggaattccagaaaggaaaaacacaacacgtgagtttatgatctagagtgggaagcaacataaatatgtgttgcttgttctgtgtgcccaggagagtctgatggcaataaagatcagaggccagggagggtttggacctgggaggtacttgagggttgcttactgtccttgagatgagttaggcttgctggattggaaaaaggatgtgtgaggccactgatccctaagctggccttaggagtcctctgagacagacaggaagaccttgggcaaccggagactaaagcaggcctgaggactgatcacctgggtggattttccacagcttctgctgatggcttcctggggcttatgaagaccaggcactgtgactccattcagaaggtcacagagggcaggttatgagcatcgaagggatttcattccccatctgtggtttctgaaatttgtctccctggagctcgcctgagagtgagtttgtggccttggtatgacactgacggttcttgtataatttgcaaagattgaggcaatttattttaattgaaaacctctaggtgtatttctggcagtgatattccccaggtgacccccttggtggatgggaagctaaacaagaaaatgtgtgtgtttcaggaaacctgatgattccagtttcagataagtccttccagtccatccccctagtcctgcatctgctaatgtgcagatgaaaggctctgtgtaacttggatctacagaaactgtcaattctgaaaggctgccttttggtcttaaaaggtgtccttgaaattactcccaggttttggccctgactgactttccagtgaaatctaattggccgggtttaaaacacagctgtgaggattttgaagccgcctttgaaagtgaactgctggtgcactattgcaatgaggacatgcacagagatcccaaccagagctcaagagtaataatgctgtggtaccttttggaaaatgctgttgtcaggcagccccggtgcggtgggaaccatgagttggttttcaggtagtttatcttcctctccccagttctcatcacttttgtgtgactaatggactaatctgcagatcgctgtcgggcaatgggtatcatctctggacacaagcagagaaagctaatagactcccagaagaccggccccatggcccgagcctcattatgtctctcggtttctaggcgtacaagtcgaccatagatgtacgatgccacacagatatctgctaatgacagagcatcccacgtgcctgctagtacgtcctgccagcacctcacttttatagtggccaaacccaaacgtatatattaccttcgaccaaattcatatgtttctcctaccctcctagcatgttctcctatcctccttgtttctgctaaaggccccaccatccttcagtcaacctgatcagaagcccttggctgcttgtccattgctggcttttccttcacgtgtcattacttgtttcattctagatcaaatccctgtagtttattctctcatcacctctctttagcagaatctctgcagccaccgaactggttttcccatctccaacctgctgattcgtaaatttcaatgtacgtgaaaatctgggagactgttaaaatgtagattcctgggtcccgctcccagaaattctgactggaggtcttgggtgttcactctgtactttaaaatgttcctggggggtattgatccagttgatagaggaccacattttgagaagttctgctgttatctttcctgggccctgtggtcaaagaagtctccctatggcacagctataattgggcttctcagatcaaaagccacccaagtctccccagtgcttagcacaccactactgtactgagccaggctttcaggaccttgtgtatgtcaatagtcaacagcctaatttcccacttttcccactaaccatgtggtcttttcagtaaatttcaaacttatttaggagacagtcaattaaaataactatatcaatagtgcagagtcagtgtcctatactaaattctagtttagacaagtggtcacagggaccaaagacattttaaaaattataaagggcacatatgtgaaattttttaaaacttggttatttactgtgatttgggaaaaaagcagtattagcacttgttgatattgtttgagcaatactttggctcaacgcttgaaatattaggatgcagagggggtgcatagtttggaaaacatggcctaactaaacatggctacttggctgtgatggttaattatgtgtcaacttgactggccacagggtgccctgattaaacattgttcctggcagagtccggaggatgtttctggatgaaattaccactggaatcagtgcactcaataaagaggactgccctcccgatgtggatgggcatcatccaatcccctgagggcctgaagaaaacaaaacagaggggaggaatttgcttcttttggcttcctgcctgcctacttgacgtgggacagcttctctcatcttctctggacctctgactgggatttacaccttcagctccccttgttctctggcctttggagtcaaatggaatcacactagaggctttcctgggtcttcagcttgcagacagcaaatcctggggcttctcaatgtccacaatcatgtgagctaactcctcgtgataagtgtatttatgtacgtcagtatcaaaatccatactggagttttccagaggaccttcatgagagttctgtttctctggagaaccctaatccagattttgatactgagagtagttctagagggccagaattttaaatatgaattttctaaaataagttctggagtttctgaaattgaatctctaatctgattaaagacactaatgatgctatttccagtagtaaagagggcaatgacagtccatggtgtaaactgtttatagaaatgcacaaaatagctgcatagaatacgcttaactaactatgagaagcaaggatctaggtgaatctgtatataatacttacaaatatttctgaaaaatgaacaaatataatgaattggttggttgttcctaatgagctgagctcagggacttgacgtgctgaacagggactcccagttcaagtgctacgtaaatgactcaagagcttcttggtgtgccctaaaaaagaccctgatcatgtgtagccacagagctgaaattgctgaaaatcaaacacagaaccttatctttcagctgactgaattacaacgcaaattgagctcccagcctcacagggtaaaagtgagggcattgattaagaaagaatgggatcctgtaaattgggataggaaggtgcgggaagaccttgatgaagctggggacactgagcccctaaattctgattattttgcttcgcaagtggcagatgtctccccatctccagtggaattgacctccttacccccagcagaaatggcctcctcaaacccagtggccatggccttcccactctcaggtaatggcatcatcatcccagtggtatcagcctgtccacttgggtctcaggaggattaaccctgcattgcctgaggaaattgtaatgacttcacttgaggcagctgccttggaagacaatgctgattctcttcaggacccactcccaccatccctctttgcttccagacctataacttgacttaagttctaacaggcccctaaaggtgagccatgtgtgacccaagagagtacttatagtcagaagaactgcttgagtttttaaattaatgtaggcagaagtccatggaacatgtgtagggctgtatactaaaagtgtgggataattgtggaaggaacataaaattgggtcaggctgaatttattgacatgggctcactaagcagagattttgcatctaatattgcagttcatggagttagaaagggctctaacagtttgtttggttggttgattggctgaaacatagatccaaaggtgtaccactgtgagcaaattggaaatgacctacctaccttagtttaatgtagagggagggaatcaaaggcttagggagattggagtgttagagcggttttgtcatttaggatctactcacccacactgggaggctgtagaagacatatatttcaccaatactgtgaggagtaaatttgcgagaggagccacagcattcttgaagacctctgtgattgctcttttctgtagaccagacctcacaataagaaccacagttactgaattggggaacctaaacacaatgggaataaatggattattgggtggcagggaccaggtagtggcactaaacagccaaaggtaaggtgggcagtgttaccgtaatggacagcagagtcaaagcagcagtcagaacagtctactcctgcagactctggcattagctaattgatcatggtgctcatatgagtgaaatagataggaagcctactaaattcttacttgatctgtataagcagaaaagttataggtcaagtgaacaaaagtctaatttgaatcataaaaacagactcatgacccctcaatcaattcccatacttgagctttttacagactcagaaccccttgagtgagactgggcccactcaaggaagagccctcattatactatagaaaatttatactgtttaatcttttttccagctttccccagaggaacatatagccttaaaaaggtaattattttagggaaaaggaaataatcagaacttttggggactgctggacactggctgtattaatctgttcttatgctgctaataaagacataccagaggctaggtaatttataaaggaaataagtttaattgactcacacttacacatgctgaggaggcctcacaatcatggcagaaagggaaggaggagaaaagtcatgttttacatggcagcaggcaagacagcatgtgccagggagctcccttttataaaaccatcaggtcttatgagacttattcactatcatgagaacaacatgggaaaggcccacccccatgattcaattacctcccaccaggtccctcccatgacacatgggtttatgggagctacaattcaagaggagatttgagtggggacacggccaaattatatgattgtgcccctggccccttctggatctcacatcttcgcatttcaaaaccaatcatgccttcccaacagtccccagagtcttaactcatttcagcattaacccaaaagttcacagtccaatgtctcatctgagacaaagcaagtcctttctacctacgagcctgtaaaataaaaagcaagttaggtaattcccagatacaatgggggtacaggcattgggtaaatatacctgtttcaaacgggagaaattggccaaaatgaaaaggctacaggcaccatgcaagtctgaaatccaatagggcagtcattaaacattgaagttccaaaatgatctcctttgacttcttgtctcatatccaggtcatgctgatgcaaaaggtgggctcccgaggccttgggcaactccacccctgtggctttgcagggtacagctcccctcctggctgctttcatggactggtgttgactgtctgtggcttttccagggggacaatgcaagctgtcagtggatctaccattctgaggtctgtaggacagtggccctcttctcacagcttcactagctactgccccagtggggactctgtgtgggggctctgaccccacatttcccttctgcactgccctagcagaggttgtccatgagggccccacccctgcagcaaacttctgcctggacatctaggcacttccatacatcctctgaaatctaagcaaaggttcccagacctcagttcttgacttctgtgcacccacaggctcaataccatttggaagctaccaaggcttggggcttgcaccctctgaagccatggcctgagctgtaccttggccccttttagaaatggctggagcagctgggatgcagggcaccaagtccataggctgcacacagcaggggggccctggacagggcccaggaaatcattttttcctcctaggctttaggtctataatgggagggctgccatgaaggtctttgacatgccctggggatattttccctattgtcttggtgattaacatttggctccttgttacttatgcaaatttctgcagcaggcttgaatttctccccagaaaatgattttttcttttctattgcactgtcaggctgcaaatttttccacactcttatgctctgcttcctctggaatgctttgccgcttagaaatttcttctgtcagataccctaaatcatctctctccaattcaaagttccacagatctctggggcagggacaaaatgctgccagtctctgcacagcaagagtgatctttactccagtttccaacaagttcttcatcttcatctgagaccacctcagcctggactttattgtccatatcactatcagcattttggtcaaagccattcaacaagtctctaggaagttccagactttctgacattttcctatcttcttctgagccctccaaactgttccaacctctgcctgttagcagtttcaaagttgcttccacatgttcgggtatctttatagcagcaccccactctactggtaacaatttactgcattagtctgttctctagctgctaataaagacatgcccaaggctaggtaatttataaaggaaagaggtttaactgactcacagttccacatgctgaggaggcctcacagtcttggcagaaagggaaggaggaacaaagtcacatcttacatggtggcaggcaagagagcatgtgcaggggaactccccttaataaaaccatcagatctcctaagacttattcactatcacaagaacaacatgggaaagacctgccccatgattcaactacctcccaccagattcctcccacaacacgtgggaattatgggagctacaattcaagatgagatttggatgaggacacagctaaaccatatcattggctctgaatggagagacctcaaacttctgtatggattatcaaggtcgagtgatcaatggagttttaactcaggtccatcttccactgggttgagtaggcctcttaatccatcctgtggttattccccgagttccagaattcactggaatggattctgccagctggcagctgacagaatcctcacaatgcctccctgaacatgttgagtgagaactattatggtaggaaaggctgagagccattagaatgttctctacctagaaaaataataaatcaaaggcaatactgctttcctggagggattgcagagattagtgccaccatgaaggacttgaaagatgcaggggtagtgattcccactatatctccattcaactttcctatttggcctgtgcagaagacagatcatagagaatgacagtggattatgatacacttaaccagatagcggccatttacccaagtgacctaaaaagttgctagctttgagtgggacctagaaaaagaaaacactgcactagatcccagctgctgtgcctgctgctctgctactcaggccatatgatccagcagatccaatggcatttgaagtgtcagtggcagatggggatgctgtttggagtttttggcaggcccttgtaggcaaattacagcacagggctttaaaattttggagcaaggccctgccattatctgaaggtaattactctccttttgagagacagctcttggcctgctactgggtcttaatagagactgaccatgtaaccacaggccaccaagttatcatgaaaccagagctgcccatcatggtttggatattgtctgacccatcaagccatagaattgggcatgtaaagaaacactccatgatcaaatgaagtggtatatatgattggtcccaagtgggccctgaaaacacaagtaagttacatgaaaaagtgacccaaatgcctgtggttccacccctgttatgccttttctccttctcccagcttcatgggagtttccctatggctacatgtagggaatcagttgagaggggaagagagaacccagtcctggtttacagatggttctgcacaatatccaggcaccacctgaaagcggatggctgcagctctacagcccctctctgggccacccctgaaggacagtggtgaagggaaatcctcccattgggcagaaatctgagccacacttctgatggttcactttacttggaaggcgaaatggccagacatgcaattatatactgattcataggctggggtcatcctgactgggtggtcaggagcttggaaattcactcttcctaccatgttctccaccatcctgaagcagctaactcgatagaacagtggaatggccttttgtagatgcagttatcatgtcagctaggtggtaataccttgcagagttagggcaaggttctccagaaggctctctatgctttgtatcagcatctaatacatggtactacttctctgatagccaggattcttgggtccaaggaaattggagtgactcactattacccactagcaaaattttgcttcttattcttatgactttatgctctgctgggctagaggtcttatttctggaggaaggaatgcttccaccaagagacacagcgatgattccattgaatagaaagttaagaccgccacctagccactttgggctcctcatgcctcaaaaaccacaggcaaggaagttgtgttattggctgggtgattggtcctgattaccaaggggaaattgtactatagctccacagtgaaggtaaggaagagtatgactggattataggagataccttctggtatctcttagtattactatgtcctgtgattaaggtcaatggaaaatgacaacagtccaatccaggctgggctagtaatggcccagacctttggggaatgaatgtttgggtcaccccactgggtaaagaaccataaccagctgaggtgcttgctgaaggcaaagggaaaacagaatgggtaatggaagaaagtgattattaataccagctacaacaattaagtagttacagaaatggacttaacggtcacaaatatttcctcctcattctgctatgaatgtgtgtgtgtgtacgtgtgtgtgtgcatgtgtgtgtatctttgttttctttcctctcctgttcccttaccatgcaacataagatccactgacttttgtcatagtatgtaagtattaatttcacaccacagtgtttaaattaggggtatcaagggaaagagtaaatatcactcaaggactttacttcctcttctggggaaggggtcagtgtatttttggttgtatgcaggatgattgtatcatattagatggaattatgacctcattattacctttatttggagattaagtatggtttaaggagatgtgtatgggtgcccaagttgacaagggttggagttgtggtggaaaactttatgtgtaaatttgacaggcctcaggatacccagattaagaatcatttctttgtgtgtctgtgagggtgttttcagataagagcagcatttgaattgatggactccataaagtagatggcactccccaatgtgggtgggcaccatctcatctgctgagggcctcaatagagcaaaaggaaggggaaggaggaattcggtctcttttgcttcctgcctgtctgctttagtgtggataacacatctcatcttttttgacccttgaactgggatttataccatcagctctcctggttctcaggattttggattcaaactgaatcacaccataggctttcccagatctccaacctgctgacagtagatgctggtacttgtcagcctccagaatcacataagccagttcttgtatcctgctggttctgtttctgtggagaacaggagttcagcattagcattcccaaatagaaaggacatgggcctcggagtcagctaggtctaaattcaaaatgtgattccacagtttacaagcctgtagccttttatctgtgacctgtgacttggcctatctgagactataaaataaggacaataatgtttcctttgggggtgaggtgagaattaaagacaacgtaggtaaagaagagtcagtgagcaaagggtgagaggctagtggtggggaagagaggactatggcttgacccttaggcagcagatagctccctgagttgagggaacatgatcagctgagaggtcccaggagcataaccagctggctatgagaagagagattaaaagggcagattacatcaagagagaccagttaggagccacacaacaagccacacctgaggcagtttgggccaaccaagatggcggcaatgagtgaggtaggagaggaaggcttggggagacacttcaaactgttacacttcaaactgtttctttaccaatgaatgctgagattatagtagacctcaggcctctagtggatcatttagcagataacagctgttcacacagcagaggcagttcatagttcctaattgtcctatcatcttccattctctcccaggttgaatctgttcttcagaaaacctggaatgaactttccaaatcatcttattgtaatgcttccctgtgttcgtctttcttgggctccccactgtggggattttatccccacaggataaaatcgtactgctttagcatggcctagatgaggcccttcctgacctggcccttgagcttccttactgaaatgctcactcacaaatatccttcacctgaatcctatggccacacagaactatttgttctgacactttgataccttcatgcctctgcacatgctttttctcctctgcttggaatgtcctaccccgttttcttctttgaaaacctctttgtcctcaactaaaatctcatctactgtgagacaccttttccattgctttcagagaaattaaaatacttctgttgggccacatggtactccctgtgtacttctatttaagctcccatcacagagttttgtaaagatttgggtaaagtattgctttctcctaggagtcaatgcctactaggtattcagtagttagtgcaagtgttgtttcttcatgtccgcaagtctagattccatcctttgctatgctctttcatagacctgaatctttctctcaaaacctgcatgttcatgagagagattatccaaccaatgctccttttcctcctaggctgcaagcatcaggacagcagagaccaaattcatcattgaatcctcaacatctagcacaatatgcctggcataaggtaggagcccaataaatattctttaaatatatggatgaatgaatgaatgagcgaatggttgaagagcacctcctttggatactgtgaagatcaacaaatcccttcttctggaactactttcttcattagatagagttcttctggttgcaataaaaaactcaaaaagtttaagcattaacagaaatttattagaaagttgcttggcaaatcatttaattcagggaagagttgaatgagtcaactggagaaagacagtaactatgctgttctagtgatgtcagcctcaggagttaatagctctttccccaggaactttgctattaatgtgattagtcctcatctcatcatctctttctctcattcaaatttcagattcctagaagagagaagttgattggcccttttaggtcaggaatttgttcctataccagtcagccctcaggaggcaatttcatgcaggataaacctggctgccagcagcccatttctgtggttcccagagaaaaaggaatccccatgagcaaaagatgtagagttaccaagtcaggtgtgcaactcggtctcttgattcatatctaggattgtttcttctttctgtctccctattcctttatatgatttataatgatggtgatggagtccatagggtttctagtagggagaaatgactgtgatggaatgaggggtaaggaacaaacacaaactggagtttggtaacattctgaacagtgtgtcctgagcatcatcctctgcattgcctaaggtaacactagctgccataaaaccaaacccaagatgtgttagggctcaaacaccatagaaatttatttcttgctctcctaaattccaaatatgtccctgatctgctggtgcctctcctccgagaagtgactcagggacccagcctccttcaatgttgttttttttccccataatatacagaatctgccaaggtcactatattaatatgcatcaagtctgtgaaggggaaagagcaaagcggataagacttagaagtgatgctcaacagttttgctcatattccactggctagaacttggtcacaggccacatctagttcccccagagactaggaaatgagctaatctgtgagcccaggaagaaaaggagtgatgttagatgaactgttagcccatcgatggactcttagctggatatacctgtagttgtttcccccggcaagtgggtgtgtgtgcttgtacctgtttgttctgcactgtgttacccgggggcatatctggatgcataggaaggttagagtgtgttgagtgcccagaaggatggattttctctggacttgttcatctacataaggattttcctctctctagaaacttccccctaaaccataagatcaaaaccctataggccttgctgatactacatgacctccctgccctgggcacaattgcttggcacagggttagatgcctgaatgatcagtcagattctcatctggaaatctgaaattcaatcagggagtcagatcatggaggtgggctgtggagtcatctacatagcagctgcatggatgaagaaagccctggaagaactgtggctccagtcttcccaaggccaattgctcatggcttccttggctgggggtaactgtagtatcaaattattttatgtgtaagttactcacattggtattggtggctatttcttgcagccaaaataattttagttaataaagaaaaatgtcatgtttatttgacgttgagcaaatcactctaacagccacagatttctcatatataaaatgagaatagtttcatctgctctgcctacctcttgggactattgtaacagtttaatggaacaaagtacataaagtgcttcagaaacagtgaaaatccatacacacattaagtggggctatttgtctacagcaagaagagttttaagagcgttctccaagtatgaaatagtttttctttctttctttttaaactttaataactttgtggtcaatccctctcaagttcaggaagtctccatagttggaggcttacttttcttttcttttgctagatatttaatactttgattacttctgacactgaaattacccattatggtgttgtcctttgccaaaccaagcctgatttttgtattattattgctgtttggggccattttcagcagctctgcttgacagtctgaatagagcaattgttctcaaccacatcatacccagtgtcctctttgtataacacatttcacacctccttacttttctggaatgaaattgtattagttgcttgggcagccataacaaagtatcacagactgggtggcttaaaccaggggtccccagcccctgggccatggactggtaccagtgcgtggcctattaggaactgggcatacagcaggtggtaggtggtgggcaagcaagcattaccacctgagctctgtcccctgtccagtcagcagtggcattatattctcataggagcgaaaaccctattgtgaactgtacatgtgagggatctaggttgcacgctaatgagattttaactaatgcctgatgatctgaggtggaacagtttcatccccaaaccatcccctgcccaaccccatcccacggaaaaattatcttccatgaaactggtccctggtgccaaaatggttggggactgctggcttaaacaacagaaatgtattgtctcaaagttctgggggctgtaagtcttgtcataaatgtcatcaaggttgttttcttctgaggctgtgagagtctattccaggcctttctccttggcttgtagatgactgttttctccctgtgtctttttatagcatcctccttctatgtgtgtttctatgtccaaatttccctttttaatatggacacccttcgtcttgcattaaggcctatcctaaagacctcattttgatttgattgtctcggtaaagacccaatgtccaaataaatatgttctgaggtcctgggggttagaacttcagcatatcttttttgggagacacaactcaacccagaacagaattataattctgttgtaattaatcatagagaggttataactaatcatataacctctctacacatattatttttaaaaggttgacataatgctctgacttaaaaataaatagaaagttatttataataaaacagtatgtgtttccataggtaaatgctcaggcaggaataaagtagaaaatatgatgcccaacttgatacctgggccactatgccacctccctgagaaagaaacagatagaaatgcagcctgctcaagtgagctatgttggccactcaaacactgtacaaggggaactgctgtcagtaacatggtgtcccaaatagtgattgactcttggcaaacaaaatacaaccctccctctgttgacatggtagtcgcattcctggaaaattcagcatatttaaaaaccttccaaggaatgctttgtgtttgtatgtaaaacagaacagagattttacctacatgaagccctggtgaaacgcttgaacatcaggcattatgtggatgactcttctctgcagggaattgtcccaggcattgcaagatgtcgagccttctttgcccccaccaaataaatatcagtaggacatcccccagtcactatgacaaatgaagcacacaaattgctaaaatggttctgatccattgagaacccttagaggagagagggcttcaaatcgtccaagggagcaactgcaaagaaaagacaggtgtgagagccaatggggtgtgccatgctgaaagtaacgtgtctgctttccaatcaaatactggaaccctccagggtcaggaaggacagcataggacacagcgactcgagtcctgtctgccatgtcatatgcctgtgtgggacttggaggtctcaactctcttctctcatgagtcagatgtgataagcccagcaaaagacaattactgatttcagagcgtatagtctagtgatgaagaaagacctaagcaggtatattacaatacaatgtgtgttaagtattgggtactgtgggagtttgtaaaaagggacactgtacccgggctgggatgtggggtatgataagggaattctggtcaaatatcagagggtgacagaaagagtaccccagggagcaatgtacttctgtggtgttgctttcattctcagtggggacagaagatgatgacgtggacaggggaccctagtttcacagataggaagcaggatgtggggtagggagctggggtgtccccttggaccccattctcaatcctggtgccacctgaacttcaatcaatacctggaactcccaaagtctccgtgcccaagtcacatcccattcttcttccggttttgtcacctttcttaactctgtcttctgaatgtaaactctaccctagcagcagagaacaaatattcaagggtggcatatcctgggggttcaggtctggcttgagctttggagaagccgatcctcttgggagtcacagtaggctcctgattccgtagacagcccctagatgcatcttcccggggcttgcacctatagagatatgggtacaacatggtgtaccatctggcatctcctccatgatggcagaaggaactgccctctcttagtccacccccacctcccatctgtcctctcctcagttgcacatgttcccagctgtgttcaccatcagggaggttttcatccatgtccaacctcctaacaaggaactctggattccagctagaagatggggacagagaaatgtttaaaggcactcctaatgtcaacaagaagaatcaaattaaacaaaaaagcttctgagtggggtccagggcctcaagaacacatctttatactaggacttggacaaagactttgatgaagggaacaaatggggaaaatgcagtccctgcttgtcctctgtaaagctgaaggcggtataaacacttccagacattatttctagccagggaaagatgctgaccagttgcccaaagccaaagactgccaggagtaataagaaaactctttaagcatgattttcccatctgtttaatttcttatgctgaaaaagaagaaaaaaatataaataaatgattcagagaaatgtcacatgcaattacctccaccagggaaaaacaaacaaggcttcacttcattaggaaggttctcatgtgacctgtgtcttctggtggggtgactgttcctcccggttggaggtcttcaacctaggagcttccaagttgagttgctcaagttcaactttggctgaaacttagctctggcagccaggcaggaccgtctctaagggtatctatcccacaggcacctccctctctcctcaatcacattgtccaaagatgaaatcaagtgaaaggatgcattggagcagtctagagtatgagaagtcagtgatgggcctattggtgttggctcaggtgtgctggtgcagggaggcaggggcttgccctatgggtgtgctcaccagcccaccatctttttttattttaattttaattttaatttttttaagcaccaattgtgcaaactagactttagtcccttagtagcttccctgggatcactaagatcaaattacagcatggtctcagtcggcaaacactctaatgggccatgcccttggggttgattctgcccatcaacatcagagcaaagaaagccaatttggacctttaacttaaatctagtctttcgaggacagtgagtgtttgccatccttgtaagccacaagcagttgatcattcaacaactcccattaaaaacagtgtcctttaaaaattctctctgcagagcacagagcccagggtcttataggcacgggtcttcggtgaacattgaagatggtgagtgttaagtggtggttgcttcctgtgctaagacctctgcccccatgtctactgcaagcagatgaccacaccactagtttttcagaaaaagccaaggtcaggttccactagctacttcaacttttctgtttcatatatcatagtttttctagatctttccttccctttttcttttctttctcttttatctcagaagaaggaaagaggagtatgtgtcttcatctcccttcagacaagaccctaacctatgtgttggtctcatctgctcctttctcatttggaatctttctccaataattcgtttcacttattcaaattctcccctctactgccttcttctactttatctgcaaatgcctctagctttcccttcatacctcaaacttggcttgtctaaaaatgcagttatgttttacctaacaaaaccagtccatctttccagtgggagaaggttctaagcaactgagaccaaactttggagttatttttgattcatctgccttctctgcatgtctctgcattcagccctcttttccatgaccactgacaaatttagctcaggtccccattatctcacattgggaataccaatgataatgacaattgtttatgaagtgtttactcttggctgggcactgtgctgcatactttagatgcattatctcaccgttcatattaatcttagggagtaccttctattattatccaccttttgcacatggggagactgaggcttagtaaagtagcttatccaaggtctgtatagttgacaaatggaagagctaggattcacaagcaggtcagccgacccacagcttgagcttttaactgttaacaccaggctgaccactgtggttgcttccaaatcaatctcataaacacacaggtcttctgtgcttcctctagtctaccttcttttctctctctaatgtaccgttgggactacatcttccccagctcaaaatgtcttgttggctcttcactgcctgcaggatcaattgcaaacaccttagcttgggcattcaaggttccagttcaaagaggatattcatacctatcttttctgagaaaatcccttcttaactctgtctactgaaatcttctgtttcctccaaaggccatcgcaaaggcctccatgaaacattttcttaccacagtagctagaacaattgttctctttgcttaaactgccattgtgcttaatttgggccactcacatggtgcttgtgctctggactgattcataatatgattatttgcatatatgtgttagttatattcttgaggtcaagattatttctgtttgtttttgcagccctcataacatctatcaaaacatcttaaaataagaagtgtattaattaaattaactctggcttcggtaacagatagactctcaatatattagtgacttaacataatgcaagtttatttctcactcatgtaaagttcaactgatgatggaggggtgggagtagtgctctgctccacagagtcattcaggggcccaaacagatggagactctgttctcttcaaaatatggcttccaactttgctttagacattgacagcagatgtagtaatacagagaatggggaggaagatggcatgggaggtttcatggcctgtgtctagaaggagcacattccattggctggaattcagtctcatggccacataaggcataagaaagactaggaaatgtagttcctgagtgttaggaaggagaagagatagatttgggttttagctaacaagtccatatttgtggaataaataattcatatattgctatttatttatcagggagagagctgagttaggaatggtggtctctggagaagggtagacacatctcatgtgctcaagatgatccattgctatgaagaaaggtgtattaaaagatcttttttaaaaatctaaaacaataagaaagaacttcagtgtggctgacattcagtatatggaatgacactgctgcttacatttgatcctcatgtcactggtctcatgtctcatccaacacatgagttaccttgagaggagaatgtgcccctgtgtgcaggagatgacagcagcccctgtaaccattcacttgcattcagagccttttgacaaattgcaaaatctgtgagcttgggtaagtgggttcatcttgtttttaacaaaaccaacctccatgaagtggataaatagctttcaataaacctatagagaaactgcttgctgcagataatactgatgcatgctcttttttggccacattatgaggcagaacaatatgaatagaatctgttctggcaaaaagtcacatacacacaagaattaaaatgaccaaaaaaaaaaaaaacccaaacctgcttgaaatatgaatttacattctctaccattaacaatgaaactcaagttaaatatgtattgcaacttgtgctatcaattaaagctggtgtgaagtgaacactatttgtaaaacattgaaaaatgtgttatctagaatatgaaagtaaatttttataatttgaatgtttagagccattcattaatcattttcaatccagcactttgccacaatcacaataaatttgatgatcactgtttgaagcctgtattgaaaaagatttcttatttaatagtaaaatgtgaaaagctatatgctatgaaggaaatgcttggtttttttttcttttttttttttttctttttagaaggaggcttgctctgttgcccaggctggagtgcattggtgccgtcttggcttaccacaacctccgcctcctgggttcaagcgattctccctcctcagcctcttgagtagctggtattacaggcacacgccaccccacccagctaatttttgtatttttagtagggatgggttttcaccatgttggttggccaggctggtcttgaaatcctgacctcaggtgatctgcctgcctcggcctcccaaagtgctgtgattacaggcgtgagccacctcgcccagccaacacttgttatttctgttgtagtggcaacagctgcaaactaatgtgtagaacgcaaactgatgagtaaactaagatgtattcttgagtcagcaaatgcagctggaagatgccttgaaaacatcactaaagaattgaagaaataaatactgggagaaatgagacagtgtgggaggtttactccatagttggattgatgtgctgatgtttctaacatgtggaaggtgttaggaacatcttatggaatttgctaatttcactcagtaatggaacacatccgggactactttcctcgtgaacctctaaaagaaagatggactggagaagataggtttaatgcaaagtgacttctgtaacaagaacagtggtctatgagagaacagtatcagtgcaaccctagatgtggcagccaatttgaccagagtataaaaggaatcccagtataatcctacagagacaggtccaaagtgactttcatttcctattcctttcacaggcaagctatcattactaagatgttgtccccagaggtacaaagttttagaggacggcagtgaagaggctaactttcaaaacaaaatgaaccaatgaaataaacacaaaaaacgttaacatatgcaatacaatttggagtattctgtaacagaaggggaagaagtattagtgaagacattttgtatcacacagaactttgctagttatctgttgtaaaatacttgaaagggttgcccaacttagagatgaggtatctagtttattttactgtgactagcattgcacattcacagatgctgtctgtggcacgtggctgtcactgaggtggcaggtatttttgcagtaataaatagacatgatctacaaagctaaaggggatattttaactttgagtaagaacattactgattttcaagagtaaatcaccctatggagaaagcattttggaaacaaaatgcttagaaatatctctactactttgctgtattgttgaaaatgacgtgttactataaaaattcatcatctgtgtatttttcaaatgggaaacaatttttagtccgctcaaaaagcttccggaggaagaattttagtgtttttaatgtatttgttaaaaatattaaaatgtcactgtcctctgactagattgcaagaaaattttactgaatcagggaaaaagaaaatgactagtccaatttcaagaaaacctttatggtggttagtataaagaattggataatgagcattctgacccagtaagtacgtacagatatgtgcatgaatctcttgtatttggacagtaacttttttagtcaggatatccagtaaaaccatgtctctaaaaccagcattttgttgtttcacaaataataaaactaagacctgcaaaaataatgaagtatattcaatcatcttgctctcattaaagattttttaaaagtctcctttaatgatcagagcatattctatgggagatgagtgatgatgctttatttagtttataaaactcttccaaacgcatgaccatatgtcttcctggcatctccacaccaggtgactgcagagtcatcgacaataatgaagtttcttagcaatttgaggaatttaatagttgggctccaaactagggacaagaagttttcattctaaaaaagccattgcaggaaacaattaatagagtgaagagacacccatagagtaggagaggatatttgcaaaccatacatctgataaggagtgaatatccaaaatatgtaagaaacccaaacaactcaatagcaagaaaaacaattcgcctgatttttaaaattggcaaaagatctggacagacatttctcataaaaagacatactaatggccaacaggttcataaaaaaaaatgcttagcatcactaattattggggaaatgcaaattaagccacaatgaggcatcaccttacacctgttagaatggctattatcaaaaagatgaaaaataagtgttgacaaggatgtggagaagagggaacccttgcacactgtcagtggcaaagtaaattagcacagccatgatggaaaacaatatggaggttcctcaaaatattaaaaatagaactaccctatgatccagcaatcccacttttgagtatatatcagtttgtcagaaagatatctgcacttctatgtttatcattcacaatgaccaacaaatgaaatcaatgtaagtgtccatcagtgaatgaatggataaagaaaatgtggcatatatacacaaataaatatgattcatgatttttttttgttgttgttgagatggagtctcactctgtggctcagactggagtgcagtggcgtgatcttggctcactgcaacctccacctcccgggtttaagcaatgctctgcctcagcctcccaagtagctgagattacaggcacgtgccaccatgcccagctaaattttgtatttttagcagagacgggttttcaccatcttgatcaggctggtcttgaactcctgaccttgtgatccactcgcctcagcctcccactccctggcgccgcttgtggagggcccaagtccttctgattgaggcccaacccgtggaagaaaattcttttatttgcaacagcatggataaacttggaggacattatgctaagtgaagtaagccaggcacagaaagacaaataccacatgatctcactcatatgtagaatctaaaaaagtcaaacacatagaagtagagagtagaatggtggttaccagaggctgggggaaagggtggctgaggggaatgggaagatgtcggtcagagggtacaaagtttctgttagatagaaggaataagtgattgagattattgcacagcagggcagctctcgtcaatgataatatcatgtatatttcaaaacagctaagatagtccatttcaaatgtctcaccacaaaaaacgaaaagtgagatgatagaggtattaattagcttgatttaatcattccgcattatacacgtatatcaaaacattgcattgtaccccacaaatgtatacagttatgatttgtcaattgaaagcaatattaattttaaaaagctatccactgacttaccatgcaaaactaaaatttgaataatgcttaaattgataggtaaggtgaggggaaaataccgagtaatgtctcctgcactgattcaacacatgttggttctctcccatttggcagacatcgtatgcacaaggatacctaagagaatacccctgctctcacagaaattatagcctagatcagaccagtgactgaacgtgacaaagtcacaccaaaatgctgactacaaatatttcctcctcctcctttttttttttttggttgttaaatttcttttggaaagtggcttaattctacctctcctccaaattcctgtcattgtgcttctggtgtccctgacaggaaccagagaagcctgtcattccagaatcatgacactttcctgcaactaattaaggttcttccaactgttcatctgtttttagcccgaatcttcttaaaatctaaagatttgtatctctgactctttttacattttcctcacaacttattcaacgttcgtctcgaagctgctgacagcttttgcttaccttcctatggtaggaaaacagagtggcaggctggattgacgtacggagggccctggaaataaacaaccatgatttatgagcatttattgtgttctaagtatgaggctgagcactttacatattttatttaattttcctggggctttaccaaatgactcagtccccaggaagacatccactttcaaggaagagggcaggaccagcacccgcgtccacacaactgtgagcaggtgacaatgcccatcattgagtgggcattcaacatttcttctccccactcgtgtcatctcctgacattccgtgcctctcccttggggaacagccctttatatagcgcaagtgattagtcattgccaaataagcaaaaagactttaaaaacttagtgttcagaagtatttagtggaaaaagtaataaataaacccaaggcttattattcctcatctatggataaaaactcaaagactgccagacactacacagtcataggatggctttcccataaaaagagaagggagggagagtgacaggcataggaatggttgcctgtttcacctccccatgctcctctgacccagcctcagttgggccttaggatcatccagagaccctccccagactaattaagtcagaatctctgggcatagggccagggcatcatgatttctttaaacactcccctgaactattccagtgaccagccagggtgacagcaagaaccttgtcagtttgtatcccacctctcagggaatgaacttctggaagtgaattcccagtccccagtggccacatctccacaatgtcctgttgcttggtctaacccaatgagatagacccccagtgtaaacctgtgcacctgtcttcctccccatgggggcttcgtcagacaccaagaggacgtagcagtgctggagagaggggctaagggaactccaggtccatggccatggtggtctggacttctttaagccccagagagaatggacttctggtggagctgccaaggtgagaacctagtttctcaaggacaggtcacaggtcacctggcagctacccccctgcctcctggaatcggtgatccaatcccagctgctgcctgaccagctctctctcctaaccctgctccccacgccagacattttgcttaccccaacctagtgagtgatcatcctgcatgacccctgttccccttactgccatcctgaactctgccttaggctaaaatttggattcagatcagctgtctgtgctcaggctccccggccttctggtatggagtcccccaagcagagatccatggcttcctctgaccctaggggtctgtctgtcttccagttctggtgttttccagccccctcattcccccttctgcctaagctttgctcatgacatttttcacaattgtctcatccaaggtttccacaaggaaccagatctggtccccacaagtgtgtggtgagctttaaacaaacactcacagtgccatgatggccaccaactttagctcccagggaatgggttgaaaactcagagcagaagaaaatgtggtttccggcatcagtcttataagtgcataagtatcctggtgagtggtaaaaagaaccccagctgtttattttacttctccctcaactcaagttgaagacttcttgcctataaactatgaagatgcaaattactgtggccattttgtgggcttttctattatagcaaccactcatttttatggtggttcaacattatgcaattttgaaattttaggtgaaaaacttgatgaactctcagcattcctgtttacaccagtggaattttaccaagcttgggaagggcaattgatccggacacttgtggaaactacagagaaccagccttgggcacaccttggtgtccactgtggcatgctcttgcggtcagcagctagaggctgcaggaagcttgtggagagaaatttccctagggtcctggcctggggagcatactttagcttctcacaactcaaagtgtggtccaacgaccagcagcatcaccttcatctgggaacttgctagacatgcagagtctcaggccccacccagacctaccgaaccagtcaggagattaacaagatcctgaggtgactcaggtcccatatttcctgttcaagaagcagcagtgttttcagccccttctttctctttccctgagtgttactattctccctcaaggaaatacttgatccaatagccccgtttacctaaaagccaagaagacaatgatgactgggtgtcacctggttctcaggttgcctgtcaggagggcagtgatcctgtaatgagggtgggtgggggcagggcaggccttcgtagatattgtgcccgcaagagatgtgtccttctgcagaggtcagtgtcatcaggggtgaacagacaggagggtgtctgccttcccctgctagccctccacatccgtgagaactttagcataagtactctgccccccactgccctcatctcgtgcacctacacggcagaagattttgggctgaggtttcctaacccatcaaatcacagatttttttttgagacagggtattattctgttgcccaggctggtgtgcagtggcatgatcacagctcactacagcctcaacctcccgggctcaagccatcctcccgcctcagtctcccaagtagctgggattacaggtgctcaccaccacttctggctaatgtcttttgtatttttagtagagacggagttttgctccattgcccaggctggtctcaaactcctgggctcaagtgttcctcccgccttggcctcccaaagtgttaggattataggtgtgaatcactgcgcctggccaaatcttagctttctcagttcctttatcctttgctcatgtaggtgggcattaccaaaaccctacattatctgacaattgtttacaataaaatggattgttcatgaagtatgcttccctatccattcagatggtttcacatttggttatttcactgcccagtagctcctcttccaggagggagatgagggagacgaaaggaaaggagggattttttttgacttatttgactttgacttatttaggcggttccatgaactcagcaaaatagtcctccccacccccaaattgttctcatttagtctgcataatcataaataacatatccaacacaaagttttgggaatttgtcaggttttctccatgtttgtttcaccagtgataaaataaggaaggcagtcacctgtaatgcagtggttcttacctgaatgaagacagggctcacttgggaagctttttaaaaataccaatgcccaggcctgcttccagccctattaggtgggagtctttggaggtaagggcaggcaatggtattgttatcaaagctctgcaggtgattgtaatggagaactcttaaaatcattagaaagttgagaacctctggtctagtaaactagtcaagagcattagttcccaaactttcacacacatcagaatctttccagaggcatatggggctcaagaagttatttgtttattttgagacagaatctggctctgtcacccaggctggagtgcagtggcgcaatcacagctcactgcagcctcgacctcctgggctcaagcaattctcccaacctcagcctccctagtagtgggaactacaggcgtgtgccaccatgtctggttaatttttgtatttttttgtagcgatggggtctcgctatgttgcccaggctggtctccagctcctgggctcaagtgatccggccatctcggcctcccaaagtgctgggattaagaagttgcacctttaacaagttcccaggtgctgctgatgctgctggtctttattctgggaccaactttgagaatcattggtcaagagatctaagatgaaattctaactctgctgctaagttgtcatatgatttgaataatcagtatctcctctttgatattctacaaccggaataggcaaacattttcagtaaaaggccatataataaatacttttagctttgcaggtcatacggcctctgttgcaacttcttaactctgccattgtggtatgaaagcagtcataaacaacgcctaaacaaacagcatgactgagttcccatgaaacttcatcgaggtggcaggatctgctgacctctgttctacagtctcatgagtgatgtctctaagtgaggatttctttgtacttatctaatttggtgctttttggactttctgaatctgagggttgatatctttcatcgattcggtaagattcacggttatcatcttcttaaatactgccttttctacatcgtttctattaccaattcatgaaactcagacctggtaacatgttagactgtctcactttatcctccgtgcctcttagctgcttatatattttctacctatgtctctctgtgccacattcatgtctatcttttgtttctagtagtccttgttggctccttatcaagtctgcatattttgatagtctcttatatcttcatcatttattcaatcacctcatttatttcctgaaacattttcttatgagtttatttcatattccatgttgatttttccaatatctgtggtctttgaaggtctgattctgcagtttatgatttctgtggattttcattcatgatggctcattttattcatgctggcctgtttcttcatgaggttagtaaatgttgatcctgacctctaattccttgtaactttatctgtgataattttttgaggcctagtatcaataaggcagtgcggtagtttcttttggatgcctggggatgctcctttatataagttgttggctttagagctccccaagtagtatgaattttggtttgctattagaaattgtcaggtgacatatttctttcctgccagttcccaaggtggagacaggcaagttcttttcttgacaggcaaggaggggcaggtacttggtctctggttcatttcctaaaggtactgctttttagtggtcttagccttatatgaggggtctcccagccatctcctcaatccctggtgcccgcatgatcccttgaaacctgggccaggccagtaagatatagcccatgccccacttggtgaccagtgccttcagccttagctgttctctctagattaatgctttctcaaagtttctgacctcctaggcatgacttgttctgaagccagttcaactgtgcttaaaaaaattattttctttaaatatcatctatagtattttgagtggcctctttgggagtggtggcatggtattaccagggacaccagtaggtaaccaaccacttccaatttctgcttcctcatctctgaatggagaaaccaacagaaccagaaatgcttcttcaatactttttttttaatgaatgaatcagtgtttttttatactgttctcagtattcttattgtttattgtcactacgccactgtgcaatgtggaggataggctaatcgcatgtttctcagattagatcaggttaattatatgaactgacttcataagatctttttaaaaaggtactgtatagaatttgtagacctataatttgaagtttcgaatttccctgtgtgattcagaagccctcatttggctgaggcactgatatgagctaattacaccatgaagcttgtattgggaacaaatcatttaccaccctccatcttcatcccagtgtggtgtgtggatctcctccccttgactactaaaagtcttttgaaattataaaacttagagttttcatgtgtgtgaaaagcagttctcaagcaagagctagatgttttgtgcgagttgaagaggcagctagatcgtggtgtacgagacgctcaggaagcacttaactcccgatggaaatatgattcgggaaggcgccaggagcctgtacaaattttccacattcttgagttggggaattctggaagaatcaagagtgctatcccatgaggatttcaagcgcctactattactactattactgcatattaataaatagttttgtgaaaaataaagtgaggcagaaatgccaaattgaaaaggaatctgcacagtttggcattttcttacaaaactaaactcttgtcgtacaatccagcaattgtgctccttggtatttaccaaaagggactgaaaacttatgtctacacagaaatctgcacacagatgtttatagcagttttattcatcattgccaaaacttggaagcaaccaaaatgtccttcagtaggtgaatggataaataaactgtggtgcatccagacaatggaatattatccaggaatgaaatgagctttcaagccatgaaaagacatggaagaaccttaaatgtatgttgctaagtgaaagaagccaatatgaaaagcctacatactgtacgattccaactacatgacattctggaaaaggtagaactatggagcctgtaaagggaccagtgattgccaggggttagcagggagggaggaataggtggagcacagaggatttgcaggacggtgaaactgaactgttctgtatgaagttataaggtggatccatgtcattatgcatttgtccaaacccgtagaatgtacaccatcaagagtgaaccctgatgtaaactatggactttgggtgacagtgatgtgtcattgtaaggtcattgtagcaaatagatggctttggtggagatattaatattgtatggagggggtagggggtgtatgggaattcttaaagttaccactcaattttgctgtgaacctagaactgctctaaaaaatacagcttattaattttaaataaaggagtttgcagaatggaatgagatggtaccttggctatctctctggagtagctgttactcgccgaaaagaacaatcaagttcaagtcacacacaaggtctaggccaggtgcctgcccctctgtgtgtccctgcctggctggagaagagaccttaggccccaggatagaggcaggagcaatggcttcttgggggcttagagggcatggaatggaaggaggacctacttctgaaagcctaggcatgcccactgcagaggggccagagggaaggaaggaagaaaggaattcatgcctttggcatttcctgcctccccaagcactgcaggagtggtttgccgggaaggctggtgttagaccaaaacctgcacctctgggagtcaacaaagagagcctggagaggctggaagggcagctggaagatcccatctctggaatctttgcaaaagaaggacctacctgtagacacacactagcatatacatgagaaaacacacagatttaaacaggtgaacaggcacacagtgacacacacatactggcacacacatgcacagtcagatgcgtgtatgcattcagagttcacgtctattgtagaaacacacacagatgatcaaggcagtttgccattctggaagtacagcataagcagtagctgcggataaacatggcctcttgatagcccggggagcaaattgttctaacatgtgtcccctgagaatgcaacagccttccagaacaattagccctcccttctccatcactcagctgcgcttgatggagctctgtctgtgtctgaagctcccagtatggtttctggcaaatgcacaggtgtgctcatcgcagtgtgcctgcaggcggctttcccgcccatgtgtcttcagtgctctaggtaggttgtaatatagtgctgtcagttcatgacattcactttatccacatgacactggaggtctttggtagtgagaacttgctgcccacgctgcctgagagggtcaacaacagaagcagtgaaggaactgaatcttgctgggccatagaagcttctgtttccctatgtccccgacagcgttgcccttccgacttggggccttcctctcacttgttgcataagctgtgggagagaaattgggggtaggaggcattttcagtagtttgggacacgtcttccttggggcaacactaagtggaaacaggcccatttgcacattggcagatggaatccaactgaatgtggaaaaaagctcctccgcagagggctcaaaccaaacagaacattaaccaaaacaacaccttttaagtttaacaaggacttagaaactagtttgaaaaacttctggcactaatagacagctttttaaaaaccaatttaaaagctcttctgttgagttaaaaagcaagaaggctttcaatgcttccattcttttcaaattctctgcttttgaacataataggattattttcttttacaattatttcactgaactgttttgcaactgcggtagacagaataatggcccccaaagaactccatatttgaatccctggaacctgtgagtgtgttaccttacatggccaaagggactttgcagatgtgatgtagaatcttgagatgagagatgatgcgggattaactacggaagcccaatgtaatcacagaggtccttaaaagatggaagaaggagagtcagagaaggggatgagaccctggaagtagaggttggagtgatgcactgttaagacagaggaagaggccataagccaaggactccactcatcctcgatgggctagaaacggcaaagaaatggactctcttctggaccctctaaaaggaagacagccctgtgaataccttgatttcaaggctgggcatggtggctcatgcctgtaattgcagcactttgggaggccaaggcaggcagatcatttgagatcaggagttcaagaccagcctgggcaatatggtgaaatcccttccctgctaaaaatacaagaattagctgggcatggtggcagttgcctgtaatcgcagctataggaggctgaggcgggagaatcacttgaacctgggaggcagaggttgcagtgagccgagattgcactacggcactccagcctgggtgacagagtgagactctgtctcaaaacaaaacaaaacaaaacaaaaacaaaaaaccaaaaaacaaacaaaaaaacccccttgatttcaggatttctgacttccagaactgtaagataatatatttgtgttgttttaagccacatttgtggtaatttgttacaatgacagtaggaagttaatacagcctatcgggtataggtcagatcctgcctgctaacttgaaaaaaagaccaacttattgagaaataaacgaactgtttcattggacctcatatagtttctttggttgcctttctctgttcaggtgagcttgtagtatgaattttacacatattcctcactatgctaagtgaaacgttcatgttaggaggtttaaatctaactgcatctgactccaagcatctttgtctatctttgctggggattatcctattgtattaggttgctcgggctgccttaacaaaatattgcagactagacagctacaacaacaggcatttattccctcacagctctggaaactggaagtccaagatcaagatactggctgggttggtttctcctgaggcctctctccttggctggcagatggctgtcttcttgccgtgtcttcacatggtccttcctctgcacatacaaatccctggtgtttgtatgtccaaatttcctcttcttataaggataccagtcagaatggattagtgaccaacctaatggactcgttttaacctaattacccttttaaaggccccatctttcattaaattctgaggtactgtggtttagggctttaatatattaattttagaggacacatttcagcccataacacctacgttaagcacagctaagagaggtctgtacaagccaagaagagaggactgtactacttaagtggtgtgtcaggactattgtctattatccatgtttacactcaagtttactgcaatatgcagcaattggaactatatcacttagtcaccttctggcccagaggaagtgtattccaaagaccattaagctaatatgagaacaggccagctctttgagtggcagaaactctctcataaaaatcttacagggttgggggtaggggactggggaagaaggggcagcataaatgcaactgagtccctacctcataccatacaacttacacataggaaaatacactacaccttacaccagtagaccaaaatgtaaaaaacatacttcaaaatgaataaagaaaataaaggaccatatctacatgatcttaaaatagagaaaactttttttttaaaaaggagctcacaaagcccaaagaataaagaaaaagagataaattcaaccacttcaaactttaaaattctgtacagaaagtgtaaaaaaaacttccgttggcaaaagtttaaaaaagatgcttggagccacattaaatagactaggaatttgtatataaaacacagaataagaaaaataaaagtaggaaaaaataaattagctgccagaagagtaaatgtgaatagccaataaaaaacaaaaagacgctcaaggtcagggaagggaaagaagaagaacagagagaggccatatcccacccatggtactggtaaaatcaagttgtcaaacgatctcaactgttggcaaggttctaggggaaatggtactctcataaattgttgctggaaatgtaaattggtaaaggcatattggagagaaatttgacagcatctaggaaaatggaaaatgtgcctaccctatgtcctgggaattgtgctttgggatacacactgaacaagcttctgcatatttccatgagggtcctatacacaatggtgtctgttgcagcatttttggtaatagcagggaaaaaaatgatcccttgatatagaaaggaataaataaaatgtagtattttcctgtgatgaaatgccgcataacaattgataataaatacgaagtttatatcagcctgaatagattctaaaaacaaggtagagtataaaaagcaagatgcaaattgatgggatatttacagacaatgtacgtgtgtatttttaaaaacaaaatcatacaacatgtgttttaattaatgcatatgtatctagaaaaaagttattcttaaggaatgcaatggatacatgatcatttagtttctggggagatgcagagaagcatgggtgttgaggttggtggtttaggggacatgagctaatatctcttcttgcctcactcctcctcttcccttccctcccctcccctctctccgtccctcctttcccccattccttctttcctttcttccttttttcttcctaaaaattgacaagaaggagatatggcaaaaaagtttgcacttgttaattctaaatggtaggaatatgaaagttatttttaaaattttatggtaacttctaaatttcagaaagcagaaaccaaaccaaacaaaaaccctggtatttataaaaataaaatcataaactataaaactctactgcaggacatcatttgtactccaaatctcagcatcacgcaatatatcttagtaatgaatctgcacatgtacccactgattctaaaataaaagttgaaaaaaaaaaaaactctgctgaaggaagcaaaggaagacttgaacaagtgaaggaaaggattattttgcatccactgtcttccagagagccagccacttcctggcatcataaactgactcctcaatgttgggagtcctcactggcttttgagttagagagaaccatatcggctattctgtgttgaacctctcttttcacctcccccatggatgcctccaccctcttgaagtactgtcataggtgtccgtttttcagggccagtaactggccccactgtcctgaagcagggagttccatttttaggcagcttaacctattaaggaaaattcttccttatttttcagaagaaaactattcctgtagactccaccccttggttctaattttggagcaacacaaatcaagttcagtgctcctttaacagcaatgtccttcaaagtgtaaagacagcccaggatgctgagtttcgatcctgcattgataagtttttggatctaaaaatgtagagggcgtcttacacaaatgcaaactcatgaacctcatatggagaaatcaccctaaaatatctaaacgtctgtgaaattcaacttttaaacttctctttggtaatatggaagaaactaacctgagaacacagaaagataggctcatatcaggcagtggatttttctctgggcttggagttggaggcgtcttccctgggagggagaagtacataattcatgagccatgcttatcagactccaaagggaaagatacagaggggtactggatgcctggttagaaactgatacctcaacagacataagagggagctacatgatctccttatgaataacattgcatattttataagggagtagcaatggcttgccaatttcaatgctaaggtgggttaacgaagtttgacttagaggtaggctctggagacacattccccactgggttgctgtttatcagcttgtttccttttcacctgcctgagaagtaaccgatgaatgaaaaaggctattggcactccgttctagagaagtgattggttgatggtgtgtctgagttatgtgagatgttgtgtatcattgtgggaaagaggaaagaagaaaggaaactgaagctcacgttctgttagtagtgaaacagggatcgaagctcagcctcctgggctcaaatgttctttgttttgttgaaacctcactactctcacagagactataaaggcatcaatagcaaatacgaaaaatatttaatgactggtaccaaccagtcaaaatggactccagctgctttatgggcatatgttggtgagatacctatcccacccacaaccatcaccaaccagagtccaagagatgctttcaaaggtgaaacagaagaagcattgctcaattaaattataactaattatattgtccttgtcttctttgatgaaatggctttgtttccatccaggcacggtagctcatgcctgaaatcccagccctttgggagaggccaaggtaggagggtcacttgagcttgggagttcaaaaccagctgggcagcattgcaaaaccccatctctataagaaatacaaaaattagtcaagcatcgtggcaagcgcctgtagtcctagctactcaggaggctaaagtgagaggattgcttgagcctaggaggcagaggctgcagtgagctgtgattgcgccactgcactacagcctgggcaacagagtgagaccctgtctcaaaaaatttagaaaaatggctttgtttcccagtagatctctctgaaattatattctatgtatgaagccatttcttcttaaaacttgttgtaggaaatcacttcaactctgactgtgaatgcaaaagaaagtaaaggagaatggatatggggaagggatggcttcatttttctacattttgaggtggctgacaaaacttgctccttcttaaagtccttcagtgtcctgagtcaagagaggagatgcaaacatcctttaactctctcttcccataatctccagccccatggttttatctttggagaatgttctcttctttaaaccctatctcccgtctccacctgttgccatcttatcctaaaaccatttccaataggacatccactgcacagccctcctcatcgccttgccgggttctatctacctctcctttcagtcatgaatcaatttcctaatcctgacatttcctaggagggtaaatacatcttaggtgatagttcccagacagcatccttaaatttgggggtgtctgatcacctacaagggaagacaattattttacaacctttccctcactgcactcccacccagtgctgtatgtttgtttttgactagagtgaattaaaatcagttttgtttggaagatttcacaacactccttgacatttttggagttcctatggagaaagattgaagccggaatgaaacctgagggcctgctgcatcgcacgtgtttgggggcttttctgttttgttgtgcaaactcagtccagtgggacacagacatgactgctatggggaggcatttccctgtttgccaaaaagcaatggtgcggaatagtttgagagaccacaaaattacatttctctactcagcactgtgaaaaattgtcatggaaaaatatattaccaactcacatcacctggatccactacagccagggagcaaaagagatttcaacccagtcactaatatgtaatggattaattcaacctgagtgtttgttgtgtctttctgctgtctttggattcaaacacataattgtctaaattgagcagtgaagattgcctggctccttagttcttgggcttctatccctttgaattcatgtcattctgattaagggagagaaggaggcaagcaggaagtttccagtttgggattaaagcatcagccccaattctggccccagcatttcaggtgcatgaataccggctggtttctccagaatatctctggtctggtctccacttgagaagtttgctctccaaaactcaaacctcaataattataaaaacttactggaagtgttttcaatatttttgaagctgaaaatatacccatatattttaaacaaccccaaagagatcaagaatgggaaatggcagggctggacaagaggcagtctgaagctgaaagcccaggtgggaagatgccaatgtcaaattattggacaacgatcaaatatttgaggcctccagcaatttgtggaaattattttagcagggatagtggcactaagacaatgatttgttttctccaagtctaaatgaagaaattgtgtggctccatgtttctcttttaattaagaatataaccttttctttaaaagagtctacctgaactactaagcccacaagacagggctctgcatgttaaaatgtcagggagtcttgaagacccaaaaaacttcttagtaattgatcagtgatagccagcctcaaatgacttccacatctataaatcgtaagccagaaggagacactaaagagaagaacagaagggtttgttgggagagtaccacaaataattaaaagttatgggaacagagaagaaaataagacatgttgattagaaacatcaggatgaattggcattgattttgctgtacaatagaaaacttgtttcaaattttcttccaacagatgcatagcatggtgagtgaggaattgaattttattccaggttcaaatttaagtttggaaataaaatttgggaaggtatgcctcatttcacaaaaactaaacaactttttgaatactcttacataaggaatcccacagaaatggatctaatttgattatccagtatctgtaggctcagaaaaatttttctcttggatttgaattttaatgcatgtttagccccttttttattcatttgctgatacattctaatattcttccttgtgaatctttgcaggtcctgttacaatctggttgtaagtgctcacctcttttaaaaacaaccaacattttcaataaattccttgagaaaaataattgcttgttatacggttacagaatatgaaagcacacatttgaattgcagctgttacctttccttctggtccttaataattggaccaaatataaaagtcacatgaatattttgtttctccttttaaatgaagagttcgttagcactatcagttttctaccacattcttttttttttttttttgagacggagtctcgctctgttgcccaggctggagtgcagtggcacggtctcggctcattgcaagctccgcctcctggtttcacatcattctaccgcctcaacctcccgagtagctgggactacaggtgcccgccaccacgcctggctaattttgtttttgtatttttagtagagatggggtttcaccgtattagccaggatggtctggatctgttgacctcgtgatccgcccacctcggcctcccaaagtgctgggattacaggcgtgagccaccactcccagcctctaccacattcttaacatgtgatttgactgcctgtggagctaacattttcctcagagggatgagcccacatgatctcatgacaaggccgacctgtcctccagcctgccagagtgcaggcacaacactggcccttgacacagcttgcagatgggcacggcctctgggctgtgtcacagctgttccactaaacctcccgtgagaaaccggtgccctagagggtctgtccccaccctgagctctcctggagccccaccatttaaaggccacacacagctcactccattggccttctctgtccttaatcctcaactcaggagcaccttgaatgttagcaggtccctccttccaagcctcagaaggactttcctcatgggtgcctgtttgcaaggctggaatttctgcacaactgatgatcaactccagagagctcctagttcactgcccatggcggttactcctgcctccagggctcccctgggccctctgggcagttaccacctcccatcttattctcagcagacacctgggcccactagaagatagtgcaacccactagaaggttagaagccccgtgagggatcatgatgcatgtactgatgtccccagtgcttagagagcacccaggataatgataatgcctggctcataatctgtgctcaacagtgttgtttcctattggacaagccctcctgtgcacactttttctcctcccaccttccccttcagagaagcagacacagcctctctcctagtcaggaatgacctccccctgccctgtcatgctcttcttctaaaaccctggtccttcccttgcttctttcctagaaccatcaatgtcatcctcaccttgctcccggcattgactccctctctaattgacactctatttctcaccttttctccttcacattccataccaaaagttgaaaagaatagggtaaagaaaagtgccaccacttaaagaaagcataggtactctaataaggaattaagtggaaactttatggaagaagtgacattggacaatagcttggaagcatccttagaatgtttggagttacttgctgatgtggtttggatgtttgtctccaccaaacctcacatttgaaatgtgatccccaatgtaagaggtgtgtgggtcataggggcggatccctcatgaatgagcccgatcccctttccaaggtgatgagagagttcttgctgatgagatcacatgagatctggttgctagaagagcctgtcaccttctctgctctcttcttgctccctctctcaccatgtgacaggaatgctctcctttggcttccgccattagtggaagcttcctgaggtctttgactaaagcagaagccggcaccatgcttgtacagcctgaaaaactgtgagccaaattacctctattctttataaattacccagcctcaggtattcccttataacaatgcaaaatgaatgaatacaattgccaacattataaaaagagagatttcagataaaaatcaacatttttgcaggcttctcctgaaaaattagaagctctggtaatgcctggccaatataaccacatcttaacagccacaagaagttcaggagcaactgttactgtcaagaaggccttgcaccaaagacacatgcaacacatctcacatctgtggtcatctgcaatgaggagccatcaagagataccaccctgccaccaagaggtggagtcaaattcttctccccttgaatctggactagaattggtgatttgcttgttaccaaaagaatgcaggagaagagatgctgcatgacttctgaagctagaagaggcaaggccatgcaacttctgctgcttttcctagatacttcctctcagatgccccctcttggaatccaaccaccatgttgtgaggaagcccaagccatgtagagaggtcatgtgtaggtgctctggccaccagtcccaaccaaactcaggccttcagtcaacccagtccagaggtgaagagcctacaggtgagtccagcttcaacaccatcatggatcaaatcttgatgatcaagaccatcacagatcacagacagatgatcactgctgagtcctattcaaatttttgatccacagaatgcagaacataataaaatcattgttgaagaccactgagttttgaaattttttgtcacatagtgtgagataactggaacagcatgtctttatattttccaggatttttagtacaaggtcactggcagagaggctgctcattattttttaactaattgggtcttagaaagtagaaggcagtcacaaagcgttcacctcttttttttcttctataacaattacattttaacatcttgggatgcaaaaagccaacaatccactagagaggagaactatttccgtggctggcatgtagaaataacgctttttaattttatttacaaaaacatcatcagctatgcaaccttcctggacagatacccactctggcttctgtttgtatagctgataattattattgtaaacttgattgtagactgtttgcattacaggtgaagagaagaagagtatgaactaccacgaaactcatttccctccgtccttcaatcaaatacaatgaccttcagctactctcaccattctctactgaaaacatcccaactatctggaaagaactcacctaaagttccccaacatcaaataaaccacgttccaaaagattcagagccagagagaaacaaaacgccctttgttgatgaagcatttactcatacatacatacaagtgtgtatatatatatacacatatatatgtgtgtgtgtgtgtgtgtgtgtgtgtgtgtgtgtgtgtgtgtatacatatatatatatattttttttgagacagagtctctgtcacccaggctggagtgcagtggtgcaatctcggctcactgcaacctctgactcccgggttcaagtgattctctgcctcagcttcccaaggagctgggactacaacaggtgcatgccaccatgcctggataatttttgtatttttcgtagtgaaggggttttgccacgttggccaggctggtcttgaacatttactgaaacatttttgaaggattcattggcatcagaatataaaaaggggcgtgtgcaaaatgccctatataaaaatatatatttaaaaccttgattacagacatagttcacattcattgcagaaaacatagagaagcacaaagaacaaaattaaaatgacctctaacctcaacacctagaggacagcattgttaacacttaggccacatcctttcctttatatttattcatataaatggaacaaatgatgttccaaagatcagatctcattgtaacccctgccctgcatcatcatagtgtacacatttacccatgtcattaaatagtcatctacagtataattttatgcatagtattctgttgtatgaatgtgtcataattttgtaattatctcctattgttggacatttaggttgtctccagttttcccttactgtctacagcatagcaataaacatccacccttgtcatgttttcatatgtccatgattattcatatgttttcatatatccatgatgatttcctagctcaagcttgtccaatccatggcccgcaggccatatgcagcccaggatggctttgaatgcagcccaacacaaatttgtaaactttcttaaaacattatgaggtttttaattttattttttatttttttagctcatcagttatcattagtgttagtgtatcttatgcgtggtccagaacaattcttcttccaatgtggcccagggaagcccaaagatcggacacccctgtcctagataaatgtctagaaaggggtttgctgagtcagaggtatgatatcatcaaggcttttgatacttattgccaaattttcctccagaatcacattccccaggcagtgcataggaattttcattttaccaaacccacaccaactggaaaacatttctttatggtctgggaatcaatggttatagtaccttggactcaacaataatacaccaacagacagctcccaagcactgaagatgggagagcagaataagtctctgagaatgcagaatggctcctttacgaaagagaagaccgagggaagtaagtgatttttccaatgttatacagacagtcaatgggtgtctgtttgacattcgacctgggtgtattcattggcctgatcaacacaatgaccaaatctggtcacagtgcaggatcagttaatgactgtcctaggcttacttgacctccctttgcaccttccactttaaagcattgcatttaggcagcttcccatactggtcttgatggatcatgatgactagaagttctctaggaccatgaaactgggctgaatcctcttcatcgatgcttataaatgtatgttctgtgtctggtcacatttgctgatcatgagcctgtatcaggctcgaaaaagggctaaatggtctgtgagcaagagtggcagattccctgaaaaaaaagtgcatgcccccatatctcctcaagttcaagatgcatgacaagttgcagacagaggcagctggtagagtctagagaagcattgactgttagtatttatggcctctgtcccttgaaagcccactgcctcatttctcacgacatagacactgtggctcatccctggtcctgtggcatttggcatcccagaccgccacccatgcttcaggagtttctttcctcctctgacttctgtgacatccatatccctctcctggcttttgtcttaccttcttatgtctgtttcaatgtctctactttttccttttagtcttaaatatgtggcacaaatctcaggtcatgaactcagaaatgttcattattttaatttttaaaataaccaattttacattctgttacaagctcttactgtgctacatggtgaaaactaaaatgttggtgaacccagagtcatctcagattcttcctccctgccctgttctcccttcccctggaatgctgatgatttctgggggttggggagcaggaggctggcaccaggttaccattcattgtcttccatgcaccctggtgcaccctgaggcttctgtcattcttgtcaggtccctgtcctcagcaatgtatgtcaacgcagcatcctcccggggccctgaaagcttctaagagctggcacgctctctattgcttctgtgcaactttgggcacctgggagacatctggctactctcagcactgatgtgcatgcagggaagttgaaacattattgaattgtcctcctggacatgtaacccccagtttttgcttctctagtactcatggctggcatagagcgtagagacaccctccaaggcttgagccctttcaggaatcctcagaagtagtttttcctaagaaagattccccacactcttccggcacttctgtccttcctattgctgctctccaccctcccctttgtacatctccatatcaccccaaccttggctgtatcagatagaaaagtcctaactttgcaatgccctcatttatagaatgggagaagttggtgagcagaaaggaatgtctagaattaatgtctagaatttaaaatactacttttaatacttaatattattttgatgtgactcatgaatctatcctcaaccggtgacactctgaaattccaagagtgtcttcactctgctctggtctccccacatcacctctgtagggttctattctcagcagtatccctaatagatggtggctcacacatgacatagccagaacagaaatcaatgtctacctctcttattatgtggaataagaatacatcctccacctccaccctcttgactccctaaggtctaccctgccactctgccactgtcactcagtaatggcttccttctcaagtcctgtggcacttactgtcatgcgtgcacatctcactaaggacaagttgctcagaattgtagttctgtgagatattgcgtaggctgtgacctgctaaggggcagagaccttgtttccttcactgctgtgtccccatggcctgttgtagcattggacacagagtaggaatgcatcaaacttttaaaaacaagctttttaaaacattgatgaattctgttaacagggttgaaggctcctcaaaagacgggcttgtgtcatacacgagtccttaatatgtgtctaatattgagcctggagataatatgtgtctaatattgagcctggagaaatggaaaatggaaaagaagtgaagactgtttcagggggcgtgcttgtctcccaaagacttaacagccttgggattcaaggtataaacaccccaaataacaaacagcaaaaacttgcttttgcagcaggaaccccccaaaagggtctaagcagctaaagaattgagagatgagaaatccccacagggaacaatgaaatcttcacagacatgatgatgcttgggttggaccctatgtcattaggtccatagtaacatcaacacacccttgtggacatccaagggctttgaccaatactcatactatgtctacttaatttaatgcataacttattaatcccataagcctattaaatattgttctaaaaatttaaacacacccaactaataaaacttatgaatttacaaatttaaaaattcctcagtatttaaacattaattacaaacttctttaataaaatttttctaatcactcaattcaactcacaagtctaatatattggattcatttacatgcttcaaaccatttggatattatcacaatgataatgaaacttcattacagttacatgtaaaacaattataaagttactagtatttggtcctgatttttttcattatatttttactaatttttatgcttttctcatcctgaacttgcagtgactatataagacaaaaatttctataccttcctaggtgtattagtctgttcttgcattgtcataaagaactacctaagactgggtaatttataaagaaaagacgtttaattggctcacatttctgcaggctgtacaggaagcatggctgggaggcctcaggatacttacaatcatggtagaaggtgaaggggaagcaggcacatcttacatggctggcgcaggaggaagagggcaaagggggtggtgccacacacttttaaacaaccagatcttgtgagaactcactcattatcacaagaacagcaagggggaactccactcccatgatcccatcacctcccaccaggcccctcctccaatatcagggattacaatttgacatgagatttgggtgggaacacaaatccaaactgtatcactagggttatgataatttatcagacccaaagtaaaagcatgatctcagcctagtcaaggaagcaagctctaggttttatatcaattggctcttcttaggatgtagggtgtactggctacaacatccaaggaaatttaactctgaacttctcagctgggatccttttcacagttgaattttgatttctatgcttgccgcatatcttctctctaccctcctacatctgcttggtgcccctgttctctgccctgggagcctgccctgtgtaggtgcatgtatgggatcatggagactctgccttctggttgggttcagctagtggggtgcccaacgtgagatcagaggcaggcaggaggtgtcaagggctggtcccttcccgcaaagtggtttaggccagctgtgtccctcactgctcctctcaaggtggcctgctgtgcgtgaccctcccataccatgtttgggtatttcacattccttgtctcttctgtatggattcataacagcgccaacactactaaccctggtatcctgcaccaccccaggaggcttcgctacactccctcctatttttgtaattattccatcattgagtgatctcgttttgccatgccacatgtttcctattgggatcctgatggtggtgaggggtttaggagaggcagagaggtgctcgagtgctctggacgcccaaggagtttaactctgactggccagcagagggcagggacaggaagggtgtctccatgcaagcgtgccgattttacaagatggcgtccagtttggtcaaaacagcccagaaggcttgcctcaggaacaggcctgctgcggacacccccaggagtgagggtacaggagaccatggaaaggcatctaagatgacaagcttggctgggggaacaagacaatcctcaaggtgagaattacaacttccagcattattgtagacatagcataaaaaacattcatcaaacccactgccaaaggaattgtccttaaatacaagtccgtaaacatcaagcagttgcggcagcctctgctgctcagcagagcctggttcttcgtttcttaaatcggcatcatcattactattgttgcccaacttcaaatgtactggcttaggtgagtgggtgatttgccgagatcacgtcttcatggactaactggagagcgaaggcaattatgcagataattcacccaagagcctcactttgctgaagttcggtaattacctgaagagcttgtttttcagtgtctccaatggcacactcagacaaaaacatttctgttttctggatgatggcctcgcttctttggctgtgtgactttcgccccagtggaaaagtgatattcatcatattatggtctgtgagcctgtgaaatcaataaacaaggcgtcgtgatctgggctggtaacagctccaactgtgcacggcaaaacccccagagctgttcattctcccaccacgcaattcccctctcattctgtaggcctgaggccagggacccagcctctcttttgttgcatttctgagatgatggtctccattgcaaaggtaagtctttcactgagctgatttaaacagcataggaacccccactgcatatctaatgaattaaaaccttgagttcagtgttggtgagaggtgactggccactttgcgaaaaccagctcatgaggctgttccttgggctcctcagtgtggccagcacatgtgggcagctgcctgggggatatgatttggaggacgcaaggaaggacccttggccttccacagtgcctgtgattccactgttagagatatacttctttggctcttaaactagtgatttccacttttaagagcctcatactaaaatgttacctctaagagaaaggatatttccttgggaccacatgagtgcaaacaatgatggcaatgcttgttctgtgcttacaagatcccacttcatcctcagaagctctgtagcaggaaggtaccattatcatctccattttgtagatgcggcatccgaggcacagaaaggttcagtaagttgcccaaaaccacatagagaataagtgtgggggccaggactggaccggggcaatcaacctggatcactgcttctttcttctgcttcttggaagctattaggtgactgcaaaaggaattgccgtttttgcattattggaacttgctgtttaacattggaacatattcttaaataaatgtaattatgttatacatcattttaatgggcatttctcacttttttttttgctaatgacgttacttgctgtttatgtttattttagactatggaaatgatgttagacaaaaagcaaatttgagtgattttcttatttgagttcaaaacgggtcataaagcagtggagaaaactggaaacatcagcaatgcttttggcccaggaactgccaaggaatgtacagagcagtggtggttcaagaagttttgccaaggagacgagggccttgcagatgaggagcggagtggccggccattggaagctgacaatgaccaattgagagcaatcatgctttaaaattggtgaggatgtaaagtcatgaagagggaattggtttaggggcaacacacctctgagagtgccctccagagttgtgtgacacagtggcccagagagagtgtagaatctccagggctatccaaaacactaaattctttggtacttattcattgaatcaatggagagactttagggatggcatttggtacagatctgtaagtaatgtatgaacatccttggtctctaatagcagtaacgacaattttaatcatcataattatttagcctgtacctgctctgtgcacagatcctgtgccatgtgccctgtcacacttaaccgttacaagagcctgtgaattacagatgatattcctattttatagaccaggaaactaaagctcggagagagtcagaatctctgatcttacgcagtgtcttggtctgctccggctgccataacaaagtatcacagaccgagtggcttcaacaacaggcactgatcaggcactgattgcctaatagtcttggaggctagaagtccagggtcacctgttgaaaggaggactggtttcccctgaggcctctcaccttggctggtaggtggccgtctgtgtgtatcccaggtgtgtctctgtgtgtccaattttcctcttataaggacaccagtcagattggattagggcctaccctaaagacctcattttaacttaatcacatctttaaaggccttttctctaaatatagtcacatgctgagttacttggggttagagcttcaacatataaattgggaggggtggggttcagggatacaattcagtccctttcagacagcaagtaggatgaactaaggagaaaaatgggactaaggcggtcattaagtctcattagatcccctctcagaagccaggcctggggcaggggaggtttaaaggtaagagcacccacatgaggccaggaggacagagcatgtctctctccttcctgcaccccttccttccatcccatactaactaatcagtcttccctataggtcaaaagtattgaatggttcagttaatttccttcagcctagaacctaaactccagagttataatgagagacccgttcgcgcccactgtgcaccagggccagatcggagctgatggggaaccatgccaaacacaacaccattccttagcgcatagttgaggtggagcatgtggaatgggcctgaggttccttgaattcttttcgaggctgagatctatgcagccctacgcccccaaagccctctctctgcattcaatttgtagcaaagtaaacaatttgtagccagtaaacagggagtccattgtgacaatgttctggggactgggcttcaaagaggccttttgttctaagtgatatttaaaaattcttcattagctataaaaagttgttttaaaaactctttcccagacacccaaatgcctctcatatgaaaaaaaaaaaaaaaaaaaaacccacaaagcttatgaataacaaggaatggtcatttgtggcccagacttctagtctggtcaagtcaacagggtgtgcgaggctcaaagagagaagctgcaggcgagggagctgagcctcctgctgtgacaggactgaggcgctgctggggacaggagtaagaccatgagcaaaacgaaactgtctgcagtgtcgagccctgtgatacgtgcactattgcttggggacaacttaaagaaggcagggccactggctcccactgtggcagggggcatccttcatccaggttagttatctaaactgcagtgtgaatgttgcccccgcaggggagtacactgaggtaaacctgagccaggcacagcaaaaagctctagaagaagaaagcagggagcacctgagctaaggagactgggcatgtctcgtggaggggttaggactcgaatggatgcttgaggaatttgggcagggaagtctatttttcccgtggcttccctagggacatggagaacccccagcatctatactaccaaaccgcctatatgaccccaaaatgctcccaagggcaccatgaatgcaactgtttttaaacaatggcctgtcccctagggcccatcctatctccaaggctggcctctctggaaagcaatatcgcttggggcctgagaagcaggctagctatggaatctccacatctccaagaacgtgcccagttacttctcaggagctcataggaagcttctgctgccctgctgcccatggactggtcaagaaacaggaaggtgcattctctgaacacccaattttgcaaagattatggtctagtcatttccctaattgtctctttcagctataacgtcttcacatccttttttttttttttttttttcctgagacagggtcttgctctgtcacccaggctggagtgcagtggtacaatcatacatagctcaccgtagcctcaaactcctaggttcatgcgatcctccagcctcagcctcccaagtagctgagactacaggcacacaccacaatgcccagctaatttttaaattttttgtagaggtggggtcttgctatattgtctgggctggtctcgaactcctggcctcaagcaatcctccctcctcagcctcccaaagtggtaggattacaggtatgagccactgcacctggtccacatcctattcttactgaggtgtttgagaccaaaatgcattctgagaattcttagataaatttcactctttatgtaccaacggaggaacactgcagtcacctaagtcatgcccctccttatgccagtgaggaaactgaggccaagacaaggagcccaatgcccaaggcacccccaacaagttaggggtagagctgagcgactctcccagcaccctcctccaaagcattgttggacacagcgtgattcttgcctcctgctcctagctcattctttagttttcacagtgaaaattccaaccctttatctgatggcatttactcccattataatagaaatatattaacatttgacctgtgatcagatcatttcctaggaacagggtttggcaggagagaagggaagaccctaaactgttcttgttggtgcatgtgtgtatgtgcgtttgtgtgtggggttgtgtgtgtgtgagacagaccagaaggaagatgggcaagagttaggagaaggacagagaaaggcagagacaagtttgcccactgcacaatattgcctccatctggcctggcttggatgatctgaaagactctgatattatccagaagaccgggggtgctgaccaaagacttctccaggcactcagaagttgtccttccaagcatattccttggctctccgagaaccacaagtaattgatgacacctcccaccccagcccccgccttctccacatcctattctttccagcttctgggcagatagatgtgcttgtttgtagactcattcattccaggctttgcagtaatctcagacttgacaaacacagcatggtcgcattcatcatggtcacctggtcctcattagggccatcaggggaggccggtgcctggctttgtgatgagtggttcctcctccacgtgggctccaaagtgcccagcagccttttgttgtttgcatgaaggccttgggtgactctgccaggctcggctcaacattttccacatgactgatggcattcaaaactttgcaatgccaataggcaaatgtcttgactggctttgtttcttgttggttcaggtggaataataaggctgattctgccagaaatgtcagtgtgaagctgggaggttggtgtttgttcataaggacacaggaaagcagatagctaagtgaccgggtgccccggggcctgggtgcccagtgccagtggtcagaaaggttgctttggtgtttttcattgttagtgagacagagatggtgtgccttaggggtaggatgggccaacaaaaggggtcttcctgggggttttgcaaatgccttatgctcactggccaggctgttgtgtttttgtttgtttgtttgttttcattttttttttgagacagagtctcgctttgttgcccaggctagagtgcaatggtgccatcttggttcactgcaacctccgccttctgggttcaagcgattctcctgcctcagcctcccaagtagctaggactacaggaacataccaccatgcccagctaatttttgtatttttagtacagatagggtttcaccatgttggccaggctggtcttgaactcctgacctcaagtgatccacccacctcggcctcccaaagtcctgagattacaggcgtgagccaccaagcctggcacaggctgttgttaaattctgcttcatgcagtctctcaaagccacgtggggcctggggggtggggtggagggtgctctgggacttgtctttcatttctgcagctgtgagaacggcttggcctcagccacagccttttctcccatttttctcttgcttcattgggacatttccggaaccaaatatattcaactagtcctcagcatcaggaggtaatcaaatatctgaatgctggtccttccattgtctgatgaccagatccagctgaaacatccaattttgtaaaatattctgctctggcatttccataattatctccttcaactgtaacgtgttcacatcctgttctaactgaggtgtttgggacttacatgctttctgataatgatgataaattccaccctttgtgcgctagagtcatcaggtgaaattgctttcgctagggtgttttgttctactgtactttgacatggattccgaagtctgcgtcatacagaagacaggcgattgtaattattattttgaaatggacacattgctgagctcctggaaatgagcctaaagataaacatgaggactcaggggccttgaaatccataccaggcagcttcctgattcttgcaggcccgtttggtcactgccagactaaacagaaagctgcccctcccctccctgggctggcactttggggcttttgttagttgggcaggagtgcaaatccttgaagatactctccgtggaaagcctgcgtctttacatcctctgcctgagaccttggccagtgctggcaacgtggcctcgagctgccctggggttccttgacatttcctcatttgggactctggggcctttgctccagcttagctgtgtatctcaggggtcaggaaggagaggtggcctatggtcttgtttttcagcctctggaattgggaagaagctttggagttaggaagagtcccaagccacaggccccggccagtttctgaccagagaggtggaggggcaatcgcggaggtgggctttgaagtggtgagggggcctgggggcagatggcaagcaagcagggagtgtgtttgttaccctgtgctaaaggtgtatccgataggtgtatccgatgtcactcagtcactgagcacccaggaaggataccatcatgtccagccaagcacctgcagacacatagattcattggctctcagccacatatggtgatgggaaactctaccttgtcccatgtggtggcatttcagtgtctactgagcatcacttgcaaccctcccgggctgttccctggcaggtcctggcactgcaggtcagtgtctggggcagcagctctttccatggggttgcctcccttctcctgcctgccacgtctcctgctggcttctcttacagctttctctacctccaactctcttccctttctagaaagacaccagagaagaagggaggaaaccctcccatccagggagttccctcttttcactcctctttctttggttcttaacctcaagcactcccttgtcccacctgggcaaccctgcttcaaggtagcttgccttaggggcctgttttcccttgtctttggaaagcaagccccagaggtgagtcagcatacaaatatagaacacgttcctcggaataaagaaatccccacttacagtgtggctggcgagggtgtggggcacagatgtgaggagggtgggcacacggagaggggaagggacgtgggttgggtcgggggaggccaagtgaccccaccatgttgcagaagaacctcagctgggtcacaggaagtggcatgcgggagtcaccatggaagccacagtttaaaatgtcaggccaccttcctcacagctgaggagggggcagataggctgatgggggaaaagtgcatgaatttttctggttccatcaatgcctctgagaatcagcaaagagcaaaaagagcaaagcccagagacgtgacctggttgaggaccctacgctccttgaaggcaggaatcaagccttgttcatgtttgcatttcaacaccaagcgcagctccaggctccaagtcgaggcccaggaagcgctggctgtcctgaaggtgctcagtctgaaggtgtcgggcccaggtgtaggaagcagagccagaggaccaggatgggaaggcactgggcccgcggtggtgagtttctgtagatgctgggctaagagggctattggcagaagaaaatcatggaaaggcattttgatgacatttcttcttaaaaaattttaaaataatgagcactcattttcacagtactcatcagaacaacacaaagatgcaatcagaacaagctgtacttccctcccgacccttcgctctccctcacccaggtaaacaattttctttctccttagaattctgagatttcaccaagttatgtctaggtgtgtgtcatttaaaaaataaccctgtctgggacttgggcctttcaatatgcaatctaaagtcttctggcaggtcagggaaattttcgtctgttattttttaaatagcacttctcttccatctgttctctctttctttctctctttccttctggaacgtttgctatttgtatgtcatgcctctcgttttgtcctttaagtctcttaccattccctcctgggttccacctctttgtgtttttatgtcgtgaactccttcctctacttgatcctctaaacctcaaattcactgcccaacagtgatcctcctcttttcagtccattttctgagttttttaaaatttaaaaaaaaaaagaagaaggttttcttttagctccaagtctttttctcagacttaaatggtatcttcttgagcattcttttttacttgtttttcaagcctcttttccctccatgggggggctccctgggatgcagatttggtccctctccccctcatcacacagatctctgcatgcctgcgattttgcaggccacagacaggcagttgagggcatgaatgttcatcgagcagtggacggcacagatgtttctgcttttcagagccagcagcaacaaaccaagtgagcagccacttctctgcagatcagagcggggcatcttctctgctttgtgctcttcctgggattaaagtccagttcttgaatatggagggatagggaattatgagcaaaggtgggagaattagcttcaaagagctagggaggggaatataccttctcgtgagcctgcagtactggcaggtggggttgcaaatgtagaccctgtacatttcggcagtaagttgggggatttcatggtcaatgatagagatgggctcaaggcagccatttgaatgtttcctctaattcagagagaaattgcccctgaggtattgccttcaacctcccatggctttcacctatccccggcaacccaagcaatagactgctgtggggcgctaaggagaatcagaggcagagatctcaccccgatgtgcttcccgcatccttcaaggtggtttagttaccatctcctgaattattctttgtctgagccatcagaggcttcgtctgtccctctgttggctccctctttggggctctgggaggatgctacagcagccctggggttagctcctccacgcaaacatggaggtgatgcagcgtggcttgcaggaagacccccaggctttagcttttctgagctgccctttgtttacctgtggtgaacataggacccaggggaattgaggatctggctggggttggggtgggatcttggcaaggagaatccaagggaagtcactcccctctaaggggaggcagagtcctgggaaataggaggcctctgacagagccaagtaaagactgagcacacagccacagcctctggaacaccatctgcagtgtggcaagatgcaatcagaagtcaggacgtggcccaggaggaggaggaggaggaggcggcagaagttcctgcaccacagaggcccaggcatcctctctgccttgaggttccaaacctaccaccacccaacactttcagaggctgtgaccaccttcgggccagggaagaaaaacttcagtgacttataacttgtgtttgttttgtttttcctagaaagtctgaacataactgcaagagctgtttaaatttaggatctaagttataaagcagataggactaaaaattctttttcctactaaccagcagtaaagacccagaaagaagacagataagttttagacaaaatcaagggacttggctttatttcctgcacatccaggttgcactgtgagttagaatttgcaaccctcccctaccccacactttcatgccttttttttttttttttactttttccagaccccattggctagtaaatgacctaaaatgcatcggaaaaacagcaaaaagagacttgaatagacatttctccaaggaagataaacaaatggccaacaagcacatgaaaaagatgcaccatgtcattagtcattagggaaacacacatccaaaccacaacagtatgataacacttcacacccacgatgacggccacaactttttttttagaaaagagaaaatggccgggtgcggtggctcacgcctgtaatcccagcacttcgggaggccaaggtgggtggatcacttgcagtcaggagtttaagaccagcctggccaacatggtgaaaccccatctctactaaaaaatacaaaaattagctgggagtggtggcgggtgcctgtaatccaagctactcaggaggccgaggcagaagaatcgcttaaacccaggaggcagaagttgcagtgagctgagatcatgccatcacactccagactgggcgacagagtgagactctgtctcaaaaaaaaaaaaaaaaagagaagagaaaataagtgttggcgaggatatggaaaaattagaacccttataacattgctggtgggaaagtaaaatggtcactatggaaaagagtttggtggtgtcccactaatttaaacacagaattcccatgtgagccaacaattccaggttgtatacccctacaatcaaaacaggtgttcagataaaaacatgtgcataaatgtttatagtatctccattcacaatagccaaaagttggaaggaacccaaatgtccatcaacagatgaatagataaacaaaacgtggtatatcctatccatacaataacatattatttaaccataaaagggagtgaagtatcaatgtatgttacagatggaggaatcttgaaaacactatgctaagtgaaagaaaccagatgcaaaggcccacaaaacatatgattctatttatatgaaatgtcccgaacaggcaaatccacagacacagaaagcaggttagtggtagccaggagaaagggccaggggagaaatagggaatgacttaaagggtggtgaaaaacttctgggactagatagcagatggttgcatagcactgtgaagatactcaaagctactgaattgcacacttcaagatagtaaatttggtgtgtgttggtgcacacctgtagttccaactactcagaaggctgagctgggaggatagcttgagcccaggagtagaaggctgcagtgagctatgattgtgctactgcactccagcctggacgacagagagagactccatatcttaaaaaaaaaaaaaaaaaaattaaatgttaagttgtgtgtactctaccacaattttaaaaaatccatacagaggatgctgtcgctgaaatattgacctcatattaagagtagcctgcattcagtaagtgttcagcgtgtgctgggcattttgtgtggactatttgttttggttcttacagggatcccaggagataatatcattattcccattttgcaggtgaggaaacagacttagctcaagggacagcccaaatcccagagagtctgactcaggaacgcaagcacttagctctcccagcacgcagcgaggtgggagggaaggagggagctgccaaggtttccttccttcttaggaccataggttagagttcagggcacagcacccaacttggatggcacagggtgctccttcctggcctcgggctgaaaagagggcggcactattataattgcttccggcttttgtctctaacatatggaaaaacagcgtgggtaagggagtctagaaggagacatcctgctgaagcccgttggaaggacgcctaaggttgcaaggaccatcgtccatgaaggaatagctggtgttacctggcgcctgaatgtaggcccttctcctctgtggagaatgtgggcctgaccccagggaagccacttcttcaccatttcccacccctggaggctgcagtcctctcatgccatcacttcccattagcttccaacaataaagatcccagactcagcctgctgagccagagagatgaggaggcattggcaggaagccactgcagagggggcagctgcctctcagaactgactttggggtggtggctggctctgtccctgctgtagccaactgggggcaaaaagtccaattgaaggacaagtttcaagggcgggttagggtgagcagaaaggatgagtccctggcagtggctgtcccagccctgggccaccgtgcctgggtctccagtgaaatcccgtccagtggtcatcatcagaaacctaagccctgactccggggccagaggtgactgtgagtggagtggacgaacccagatgggtgaccacaatgaccagaggagggagcaatggctgcttccagatggggagggggtagaaacgccatttgaactctatcctgaagattcggctttgggcagtaactggcatcaaagccacagtcctgaagtagggcagcatcacttcactcttatctttgaggaactttttttttaagagacggggtgttactttctcacccaggctggagcacagtgatgcacatggcttactgaagcctcaaactcctggcctcaagtgatcctcccgccttggcctcccaaagttctgggattacaggcataagtccctgcgcccagccagaagctttctgatgatatattataacttgggcctcttgtgagttactaaattgaagtggccaatcctgttcagctctcatgccagcttctatcgatttgctatgccttcctggaccacagggttgagaaggattctaaggcttaggggaaaagataaccattgttgattagtaatgcctgcagtgggcacacagcaggagcagcagtggccgtggctaactcctgcagcctcggcagcagctcgtgttaaaacggtggctcagctaagggttgggataagcatccccgttatcacatgtgttcatgggaatgattacaagggaatcatgcctggatagtctctggaggtgatgatcacccccttccatccagaaaaataaatccttccagaaagactccttcctttcttctccgttatcttgtgctcccaagaggggcagcaggtcaaagaaaagggcaatttcctcctctttccctgggaaggaaccaatgactggcaggagggggcctctttctccaaggctgttctggagctcttgctggctgagggcagctgcagccacacagctcgtttcttgacatggaaagctgaaacttctcggatcccaagctaaataccgttgctgcaaaacatccagtttttctttttcatgggcccctggtgaattaaaacccagaagccagaggcccacctgccaattattgcagttaattctgtgcaggcttgactcaggaaccgagacagagcgttctgtttgctaccgggggtgcgcagggcgggcgggtgggagccggctgtggccacagcgctgtgaatgccctctgtgtgtgctgggctaggcctggcagccacagtgccctcccttgcaccgtgagcttggcatccaagtgtgacttcagtggggcctctttctccttgagtctgcctaagatcgaagattctgtcaggaagtttccttccctctgctacatgtgcagccccccgcatgcccctgaggaactcagtgacaaacacttctactttttccaaggaataagagaaaacagcactcagcttaaaactgtggggtttttctgtggccttttctcctctgacccaattgccttgcaagatcccgctggtttggggagagaacagtcaccctttgttccctggaagccccttttgtagtgggccacctttgagttccagcttggtcttgcctcaaggtgacatcaatgctggttgctcaaggctctccctgctgggttcttctagggcctcttcggtcgagtcattggtttatttattagttctttcactcctaggccctgggaagactggaggaaaagatggagttcttgtcctctaggagtcaagcaggaaagtagcaaatggttgagtgctgatagtggggcacagagagccgaggctgggttccccggattagaccctgtccctgtcctctgcatacaagtcacacagagcagtccctggcatgtggtgcaaacgtaaaaggaggggcttcatctaactgagggggagatgctatccaggaagttgtccctaaggaggggggtttaagtggacacctgaacagtgagtagatgcagcaggaagtagaaatgaaggggcaggaaggcaggcttaggagaggagacagggtagaagtccccaaggcacagggatcattctaataactgagaaatccaagaggcctggagtgcagacagctaggagaagcccagcgtagcatgagctagggcgggtgccaggcagccatgcctggcctcagaagccaggataagaatgttggcctccttcttcgggatgcagggaatcgatgggataacttgagcgtccccagttttgaccactgcaccacagctcctgctcttgtcttctggaccgaatacttggcccctggacatcaccttccaatgactcagaaagataagccatgtaacagtggggttgcctgtggtgaatactataccagggcgaaggctggtggaaagatcatgaaacctaagccctgactccagggttggaggtgactatgagtggagtggactgacctagagacgggtgaccacaatgcccaggggagggaataatggcttcttctggatgggaaggggttggagaacatttggacaggaaacgccatttgagctgcatctccaagatgaggctcttggatgaaggccatctgagtcacaagactgggggtgcagaggtgtgaagggaatggtgggttcaggatcagcgttcggagggaatgttttattgggctgtgcatctcctgaccctggaacattcaagcctccttactgacccagacagtgggtggctgatgggaaccatatgctggaagtcttccggtggggcaggaaggggcctcattccaaaccccatgctgagaaaggagctggccggctcggaccacttattgtcccctgctgggaggggtgacgctgcggcttgctggactatctcccctttgatgaagaatgccatcctctgggatgggcggcaaagaaagggccagcctgtgacttctgtcagctcccccgctgcatcttagatgtgcctatcctgggagatttccggaccagaaaactcatctttaaaaagcttcgtacctgccccaggtcccgggggatcccatgtcccgtcctcccctccggccccagctgcagcaaatgtctcctaacaggggcccaactcccagtagccaccttaatcacatggcaggagtgtctattttcgttacataaacagagttgtctacatttggattccggggctggctacaggaatttgtaaacagcgtggtgtacgtgtttcacagaaagttgccaggctgtgctctctttcccactgcctgttgtccagttttcccttttatagagagtctggctgggaaagagagacagaacttatttgggaatagaggacaatctctcaggcaaattcctctccccccaccctagtcaccgctacctcctcggcttcaattttgaggtctgattcaaaattaagacccttctgaattatgaatccctcctaaatgctagcttctatagatataaatataaacctcatggaaaacaaatttggggagattttattcccagaagggtaacaaggaattttgaagtttgaggtagattttaaaaactcttggacactgctgtccctatctgagctgagatcccacataacatcatgacattccactggtctcctacttcccccaggagctgtcttgagcttgcagcagaggcttttaaggctctggagtgagggcagcagtagccccaaggaaaagaggggtgcccactttttcctttcatttaataaccattaatgaagcatctattgagattagattctgtgttcagcactgtgggcctgagaagatgtttaacacaaatcattggtgtcaaaaaactgcagcgaggccgggcatggtggctcacacgtgtaatcccagaactttgagaggccaaggccggcagatcacttgaggccaggagttcgccatcagcctggctaacatgctgaaaccccatctttattaaaaatatgaaaattagccgggcgtcgtggttcacacctgtaattccagctactcgggaggctgagacagagaatcacttgaatccaggaggtggaggttgcagtgagccgagatcgcgccactgcactctagcctgggagacagagcgagactacaccttaaaaatcagacaaacaaacaaacaaaaaacctgcaatgaaagatggacttgttaagagtcactgagatggatttgggatggcagagtggatttgctgaaggaatgaatgaaaaataggtctgtgactgacaatgaagcctgttacagtggttgaagttgaatctgcatcttaaattcagtgtaggctaacttttgctctaaccgaaagctagggtcacaagccatcctgctttgcctgggactaatgggatactcaggacacaggatggaaaagttctcaggcaaactagtgcaaattggccaccctacttaaaattcaaagaaaagagaacgaggaagaaaactcctgtgtaggaactatccaaactaggaaaaataaccatgagaggtcactgggacatgaagcatatatgagcagttatttttctccttttatgggagaatgaagaaaaagaaaataatctacccatgtagaaagaaatagagggaaattaatgagttatgagaaaatgggcattgacaatcaaaacaaaagggcttacattcttaaaacattctcgaacaaacctggcattaaacaaagctactgatacattttaacttcatctgcacagataactgcaaagaaatgcatggcttttaatcactccaaatgctgtaagggtctgaacacatccatttcccaagagcatctgtgttcagaacaggtgaagttagaataagcagcggtttaaaataatgtttagtaagaaaagtttaatgttatacctagatgttgtatttctttaccggttgctgtaaagtgtatcctttttagaaagacgtgcagatgttaatagttaatgattttcaaggaagcaaggatgtctgctattttaataaagagcttactgtgctagaaatgtcatagttagtctggaagcatgcaccgtgatgtcagatcagttgagggctctggcaaagtgtagctggtcccttggattaataaagctcagatttggcgccacctggcggcagctacccaaatttcaggtacagaacccaggaagagagaaacacatcgcgcattttaagcttagccagtggcagaaggccaggcgcggtggctcacgcctgtaatcctagcactttgggaggccgaggcaggaggatcgcttgagcccaggagttggagaccagcctggacaacatggcgacatcccatctctacaaaaaatacaaaaattaggcgtggtggcgcgtgccaggctgaggtgggaggatctgttgagcccaggaggtcaaggctgcagtgagccctgactgcaacactacactccagcctgggtgatagagtgagaccctgtctcaaaaaaaaaaaaaaaaaaaaaaaaaaaaaaaaaaaaaggcagcaaaggccatttctatcaccaaaagcaatattttatgcatttttgaattgtgagttgtgcaaaagaacctgggtcctcttgtccaaaacttttcattcagagtatgagtttttgtagcctttttttctcagctgtcagatgaggttctttgtaactaccttgcagggttggcataaaaccagagccatggtatataaagtttcttacaccatgaaatactacgcagccacagaaaagaacaagatcaagtcctttgcaggaacatggatggagctggaggccattatccttagcaaactaacacagggaccaaaaacctgataccgtgtgttctcacttataagtggaagctaaatggtgagaaccgatggacacaaggaggggaacaacagacacgggagcctacttgagggtggatggtgggaggagggaggggagcaggaaagacaactattggatactaggcttagtacctgggtgacaaaataatctttacaacaaacccccatgacacaagtttatctatataacaacccctgcacgtgtacccccaaacctaaaatataagttttttttacaagaagctattactttaaataaataaataaataaataaataaataaataaggtttcttgcacattgcctggcactcaggagttgctcaataaatgggagtagctgagctggtagcaatggctgctgacgttactgatgggcagggtgaacctgaaagtgctggctgtgggctgtaggttcagattgcacttgaactttgctgccaccagtaatttcctgagagtggataatgcagggttgcttgaacagtcgagacacatgagaatctgaaagtgctgctggagcctgggctctctaacggaagcagagcacaaggtcaagtttcctgggcaagacctttcccagaggctcgaacaaggacctaagttcttgcccaacctttgacaagtttccagagatgttatgaagaggagacagttctttctgagactgggcaaacagggaaggtagtgaaaaatgctaataatttgttttgttttgtttttgagacgcagtctcgctttgttgcccaggttggagtgcagtggcaccatctcggctcattgcaacctctgccttttgggttcaagtgattctcctgccccagcctccccagtagctgggactacaggtgtgcaccaccatacctggctaatttttgtatttttagtagagacagggtttcaccatattggccaggctggtcttgaactctgagctcaggcaatctgtccacttcagcctcccaaagtgctgggattacaggtgtcagccaccacacccagcctaaatactaagaatttttaaagaaggaattgatgcttatagaattttggttcctttttctgtagaatcaataggctggactagatcatctttaaggccccatatagttgttttgtgtttttttgagacagggtcttgctctgttgcccaggctggagtgcagtggtacaagcccagctcgctgcagccttgacctcctaggctcaagtgattctcccccatcagcctctcgagttgctgggaccacaggcatgcaccaccacacctggctaatttttatttttctttgtagagtcaggagtctcactacattgcccaggctggtctcaaacctgggctcaagtgatcctcccaattctgcctcttgaaatcctgggattacaggcgtgaaccaccacccttggctaattctaacattcttgaatcctaagagttcatgaccaaggaatacaaaaagcacagccctgttggtgaggatttggagcagctggatcttcattcattactggtagggatgtaaaatggtctagcaactctgaaaactcatctggcagtttcttataaaattaatcatgtacctgctatgtaacccagagattgcccaaagaaatgaaaatgtatgttcacaccaaaacctgtacatgaactttcatagcatctctatttgtgatagcaaaagctggaaataactcagagtaacagatatttaatggttaaatattcatatgatggggtactactcagcaataaaacgaaactagctcttgatatacacaactcggatggatgtcaagagcattatatagagtgaggaaaagctgatctcaaaaggttgcctactgtctgttcttatttctttaacgttctcaaaataacagatttatagaggggatacctgcttagtggttaccatggcctagggattgcagaaagggttcaactattaaggggtggcactagggagtttcttaagggtgatatagcaattttgttccttggttttggtggtggtttcccaaatctatacatcagattaaattatatcaaggctgggtgtggtggctcatacctataatcccagcactttgggaagccgaggcgagaggatcgcttgagaccaggagttgaggaccagcctgggcaacctagcaagatcccatctctacaaaaaataacaatcacaaaagattagctgggtgtggtggtgtatgtgtgtagtcccacctacttgggagactgaggcaggagtattgcttgagcccaggagtttgaggttacagtgagccgtgatcatgccactgcactccagcatgggtgacagagcaagactttgtccccgctacacacaaaaaattgcattgctgggcatggtggctcacacctgtaatcccagcactttgggaggctgaggcaggtggagcacctgaggtcaggagttcaagaccagcctgaccaacatggtaaaattccatctctactaaaaatacaaaaattagctgggagtggtggcgggcacctgtaacctcagctacttgggaggctgaggcaagagaattgcttgaacctgtgaggcagaggttgcatgatctgatattatgccactgcactccagcctgggcaacagagagagactccatctcaaaaaaaaactgcatcaaattacacacacacacacacacaaatgagtgcatgtaaaaatggtgaaatgtgaatatggtctgtggtctatgtaactacaaggattatatcaacatcaatttcatacttttgatgttatactatagctatgtcccatgttactattggaagaaactgggtgaagggtacacacaaaatttttgcaatttcctgtgaatctataattctttgaaaaaataacttaaaaagagagaaatgtacaaaatggttgtatcctacattctctaaaatttgggggaaaaaaaggaaaaaagaaaagcaaatttcaaagcctttctctgggctgttggcagccactgcaggcagcggagggagcgccacctgcccagagcacatgaggctggttttcattgtcactgcagaggtgacacttctggactttgactgctgcgtatgaaccaggcacactcggcagcacagtggggacacattgtggccattttgaataccacagcctgagatttagacttttctttctctggccctagcaaaaaggaccctatggtaaacaccctgcctaatgaggtttgaaagacaataaacgagactgtggttggcaggggttctccagatgtagacagcaggctctcctgggccatgccctttctgaatactcagtcaagctgtgctatctccgtgaggttgctaattggaagcaaattctgaaagccaccccactttggaatcccagagaggcctggagatgagtttcctttaagacaaggcaaggaaccatgggtttgttctaaattttcaaggacatggaatcctttgaaaagatttcttaagggagcaggtgcttggctttggcttccgtccccattgagtccaaacctgagagcatcgggaaagcggaggtgggactccatggtggtggggggtgttcccagggagaagctgggggcgcttttcctgccctgagcactctccatcctgggcttctgtctctgaatcagaaacaaaagttccagggaaaacccacttcaaaatctgcccaaacgaaaggctgtgagaataaggagatgttgtcaaaaaatatgtctttatggtttggatctgtgtccccagcaaatgtcatgtcgaattgtaattccccagtgttggaggtggggcctggtgggaggtgagaggatcatgggggtagatttctcatgaatggtttagcaccaccatccccttggagctgttctcgtgatagtaagtgagctctcgtgagatctggttctttaaaagtgtggcatcgcccccagctctcttccttttgctctggtcatgagaagtgctggctccccctttgccctctgtcatgattgtaagtttcctgaggcctccccagaagctgagcagatgccagcatcatgcttcctgtatagcctgcagaaccatgagccaaagtttaagaggtttagcctgttttctttataaactacccagtctcaggtatgtctttatagcagtgtaaaaatgaactaatacatacatatctgtcagaaaaagatacaacatttaataacgatggaatgtaaatatcaaatatttttatttacaaacaaataaaagtttttatatagaactaaaatgatttctataacacctgttttcactgttcttcaatatttctcttttaacttttcaaagattttctttttaaaatttttttttgtagagatgggatctcactatgttaacccagtctggtctcgaactcctggcatgtgatcctccctccttggcctcccaaaatgctgggattacaggcaaaagccaccacgcccagccaagattttctttttttattgtctgtatttaagatatgcaacaagatgttctgacgtacatatgtggagtgattaccacagacaagcaaattaacataccgttaacatattacaccaaccattaacatgtccatgttcgtgtgtgttttgggggggggtatgtgtggtaagagcacctaaaacctactctcttggcagatttccagtatgcaatgtgtacaatgcttataaacatttttctttattaaaacaaaacaaaaaaccgccacatatatggaaagagctgtgctggatgcctaaggaggaagcttgatggttctaagcaaaggccaaaaagtggtctgatctatggaaaaactggaaagccggcaaaatttgctgtgagagccctttctctgctcccatctgtgctgatctgcttttttcctacaagagcccattggccttttatagttcctggggaaaatgaagcccccacggttgtgcctccttgagttccaggacttccccctctccttcccatccagttttaacccccacacacctgtggcctgcacgctgggggttcttttctgtttcttttgatcctcttcctctttgaaaatcatctttgtaaaacaaacctaatacggcaccatttccgtccagattcatgctccaggaagaaagggtgctggaggctacaggggggcctcacagcccatgtgatctctgtgttacattcattttccactaacagaaatcaaagaacataccctgccattcggcctgtgacaggggtctttgttaactttgggtcttgctaaagttcagtaatgtcagggcaaacagaacacaaggaagctgagacgttctctggctttccgttgcaaactaggcctgttgatgatggtgacaagcttctcaatcccagaagcatgaagccagcaaggctgggaaagcaccttgggggaaggctccatcagaagagaatcaactttatcaaaacttggtttgctctatcacagcagcggcatttcagaagcatcctaccaagttgcttgtttcattgataaactaaagaaaccctacatgtttggagagttcttggtgaggcctgttcattggaagtcgtcatgcttgtgtgtatcttagagaagaagaaaattccagtagttcctcagtcaaatggtgtaatccactccagaatcattgccatctcttctaatattctgaaccaggcacagagaaagtagaagctcagtgcatagctaaatgaaattaccagagattctcaatgcccccatttccagcttttcacaaaaccattgtgctcacattaatagcatcaaggaaagcttcctactctgtgagctcaattagaaacgtcatgtattgttaatggttttgaaaaggtgaaaactttcttttccagagtctttttcatcggaatgataatcttagtaccttgtaaatagatgaggtggttgatttcatcacagccagaatctagaattatcaccattcttttgggatacagtgagagcttttttccagccagacacagaatgggcaatacaggtaaggtccctgttgtcatggagctcaagttctgttagagacaggaaagaaaaaaacaatcaataaaacaggaaaacttcataattcaaagaagccacgcacagctgtgagactatgcacaggcaccattcacactgtagactaagtgacagctgcccccgggttaagccctgccttgcctgggcaacagtacatggcatccccacacaattcagataatacaaagtgctatcagggaaatgtgaagaaggaagaagctgtgccaagattgggggaaaagcattagaggcagagagagcagcgtatgcaaagatgctgaggcagtccgtataattgcaccatgaagaggtccctgtcctaatctctggaagctgtgaatatgttaccttacctggtaaaatggactttgcaggtgtgattattaagttaaggatcttgagatgggaagatgatcttggattatccagatgggacaaatgcaatcacaaggctccttataagaagcaggcagggggctcagggagtgggagaagatgtgatcacaaaagcagaggctgggccgggtgcggtggctcatgcctgtaatcccagcactttgggaggttgaggcggacagatcatttgaggtcacgaatttgagaccagcctggccaacatagtgaaaccccatctctactaaaaatatacaaaaattagcctggcatggtggcaggcatctgtagttccagctactagggaggctgaggcaggaggatcacttggacccaggaggcggaggttgccgtgagtcaagatcgtgccgctgcgctccagcctgggtgacagaatgagactctgaaaaaaaaaaagaagaaagagaaagaaggaaagaaagaaagaaagaaggaaggaaggaaagaaagaaggaaagaaagaaagaaagagaaaaagaaagaaaaaagaaagagaaagaaagaaaaagaaagaaaagcagaggctggagggatgccaggatgccagggagagggccaagagccaaagaatgtgggtggcctctggaagctgcaaaaggtaaagaaatggattcacactccctcctcaacccccagagcatccaaaagaaactggctctgctgccatcttgatgttaacccagtgaaatccactttggacttctgacccccagaactttaagataatattataaatttgtgttgtttaagtcactaagtttgtggtcatttgttataacagcaatgggaagctaatacagattcaaagacaaaaacaaaacaaaaagcagagaagcaggatcagactatgtgagaagatgagctcgcagaaaggaccagcggccagtttttccatggcctggccagctgcactaagcattccgggttttattttcagggtgaaaggaacccaatggagagtttcaagcaggggaattgcgggctgtggtttgtgtttccaaaagatcccactggtccctcttagaaatatgtgaatagggacagagtgcaaagccagaggcgtgagcggccagcagtccaggtgtgagctgagaagtagctgtgcggggacgtgtttggagagtcaaattattactataataataattattattatttagagatggtgtcttgctctgtggcccaggctggaatgcagcggcatgatcccggttcacggcaatctctgcctcccgggttcaagcgattctcctgcctcagccacccaagtagctgggattacaggcacctgccaccacacctggctaatttttgtatttttggtagaaacggggtttcaccatgttggccaggctggtctcgagctcctgacctcaggtgatccaccctcctcagcctcccaaagtgctgggactacaggtgggagccactgtgcccagcctggagcgtcaaatcaaaacaaaaaaaccaacagagcagtaagaaacatatttcaatttattaccttcggggctaggggaagagagacaagttctaagaggcttttcgtgcaaaaatggaaagaactaggtttaaggcaacagtgagaaatgacaatgaaaaaggcaagcttctgataacagctgtctgtttggctggtgagacggattgtgactcttctttgcaattggccattgtactagtttatggcacaaaaacccaggcacagttttcaaagaagttgagatggggtattaagggtctggtgggttcgatgtcacccagcacaaactcatacacccacgttcaacctgtgcagagtcttttctttaacaggatgcagagtcaacagtatttgctagtgaattgggggtgtggcagggtgaccaaaaaaaaaaaaaaaaaaaagaaatctaagttaattctttggttttttggcttacacaactagaaagaaagtggagtcactttactgtgataggataggagtaggtttggtaggagaattgagttatgtttggacatctgaggttgagatgcctattagacatctgagtgaaaatgtcaagtgagcatcttgacatttgattctgaaattcagagaagaggactggactggagatacacatttgcaagtcccctacaaatacatggattttaaagaaatcaactttattgtggtatagtttacataaaattatacacacccattttaagtgcatggttcaatgagttttactcaggtaaccacctacaacaaccaagatatagaacaattctatcaccctccaaaattgtctcttaatcctttgcagtcaatcttcccctcatctggtcatagaaaactactaatctgctttctgtcacgagggatggcttttgtctttctggaatttctagaaatggaatcaaacagtacaacttctttgtgtctgacttcttttgctcatataatctttgtgggattcatccctgttggtgcatgtatcatttatttgttcttttttattgttgagcaatatttcattgtgtgaataaaacacaatttgtttacccacttatctgttgagggatatttggcttatttccagtttttagctattttgaataaagctgctataaacattcatgagtttttgtgtggcatattttgaaaatttctctaggtaaatacctagaaggggcattgttgggaacttttgatctagttaccaaactgtttacaagtggctgtatcattttacattcctaaggcaatgtatgaaaatccacttagcccacatcctcaccaacacttggtgttgtcagtctttttaaatgtagccattctggccaggtatggcggctcatgcctgtaatcccagcactttggaaggctgaggtgggcagatcaccctgaggtcaggagtttgagatgagcctggccaacatggcaaaaccccgtctctactaaaaatacaaaaattagctgggtatggtggtgtgcactgtaattccagctactcttgttgaggcaggagaatcacttgaaccctggacagggaggttgcagtgagccgagatctcaccactgcacttcagtctgggggacagtgagagattccatctcaaaaaaaaaaaaaaagtagtcattctggtgagtgcgtagtggtatctcattgtaattacaagttatatttccaatgacgttgagcatttatgtgcttattgtatatattttttggtagtgtctgcataaacctactgtccattattattgagtcaattttttttcaaatgatgagttctttatgtattctagatgcaaatctgttgtatattctagatacaaattcatggtggttatttttttcagtatattacttgcctttttattttcttaattatgttcttcaaggagtaaaagactttaataatgatgaggcccaatatatcaatattttccttttatgatccatgtgtttcagtctttgtttcctccatctgcttttaagattttctcattgcttttgattttaagcattttatgcaaaggtgtgactttctttgaaataattctctttgagctttttagttcttgaactcatggcttgatttttttaaaaagcagttttggaaaaaatctcattcactatttcttcaaatattgcttcagcttcagccactttctcctctctttctgggactccaactgtacttctgttagtcctttttcctgtatctctcatactttcttgggtgtatcctattattttgttctgtgcttcactgtagatattttctgctgactagatttctaattcactaatcctctcttcagctttgcctatgctgctggtaaatccatccactaaattgatacatttaaaaaatagatttctgcggagattctatttattcttgggctgactctggaaatttatatttttctggcaaattatatatttcatccaaaacttcaaattgtatttccagagtgactttttatttagttgattctatttttatttgttttctcttttgttcctttctgtttttgttctaaagtttcatttattctacatttttagtttattttttggttcttttgctttttgagtttaatgagttcctattattttccttttatttatttttattttttagagacagggtttcactctatcacccagactggagtgcagtggcaccataatagctcagtctaacctagaactcctgggctcaagcctcttcccacctcagcctcctgagtagctagggctacagctatgcaccaccattcccagataattttaaacaatttcttttttatagagatagagtctcagtgtctcactatgtcacccaagctgttctcaaactcctggcctcaagtgatcctcctgcctcagcctcccaaagcagtgggattacaggtataagccaccatgcccagcctcttttccttttagtgaattcatttactgtataaatttgcctctaaggttcacattgtctgcatcccagaagttttcaaatatatggcagttcctttgtaatttaatatcttattatttatgtgttttcctctttatccatatgttacgtgatgatatacttattttttggttttcagatatatcaaggtgtacagactatatttttgctgatttataattcaactgcattgtagtaatggaacccagtctacataaagctgatatttaaaaatttggttggacttcttttgtgacccagcacatggtgagtttttaaaaccgttttatggacacttataaagaatgcacatcatttgttggttaggtgtgggttctctccatctattttataaaggtaattaattctattactcaattctatatgtttactttttaaaaaaatctatcagtttctgaaacctaattcctaccattgtgcatgcctcaatttcttgtaaatctgcctgtttcactttgaatattttgagtccatatacaagcccatgattttactatcttcttcgcaggttgtttcttttatcaaattgtagtgacatttaatatcctatggatcacctgaaatttcagtttttcttagatgtctgcattttagccttagcttgatatgttttttcatcaccttattttcaactttttatttgtttttattttagatgtgcatctttattttgtattttattttttgagacagagtcttgctgtttcacccaggctggagtgtagcagcgtgatcttggctcactgcaacctctgcctcccaggttcaagtgattcttatgcctcagcctcccaagtagctgggattacaggcatatgccaccatgcctggctgatttttatatttttagtagagatgaggtttcgccatgttggccagggtggtctcgaactcttgggttcaagtgatccgcccgtctcgccctcccgaagtgctgggattacaggtgtgagccaccagccccagcctagatgtttatcttttaagaagcatatagctagattttattttgttattcagtttaataatacttcttttaataggtacttattttaaaggatattgtgattatagatatattcagatattatcttagtcattggggcagttatagtaaaaattataaactggatgacttataaataacaaaaagttattgctcatagtttggaggctggcaggtccaagaccaaggcactggcagatgcggtgtctggtgaggtctccctctttgattcatagaccgtgccttctagctgcgacctcacatggtggaaaggggaaggcaacctccctgtagcctcttttaaaagggcattaatcgcattcacggggtctccatcctcttggcctaaccacctcccaaaagccctaccttttagtaatatcacatggggagttagaatttcactatatgaattttggggggacacaaacatttatgccacagcagatatctttctaccaccttatttggtgatttctgggttttgtttgtttgtttaagacagagtctcgctctgtcggccaggctggagtgcagtggcaccatctcggctcaatgcaaccttcgcctccccggttcaagcgattctcctgcctcagcctcccaagtagctgggattacggacgtgtgccaccacgcctggctaatttttgtatttttagtagagactgggtttcaccattttggccaggctggtcccgaactgctgagttcaggtgatccacccgcctcggcctcccaaagttctgggattacaggcgtgagccaccatgtccggctggtgatttctgtttaaaagttttttcttaaagtgttttttcccacctagtttttcattgaatgggtaaaacattctacatttgcttttattaaaacaagaaatgaattttgctgcatttcaatttatagattttactatcctacctcgtgccaggttctgtgctaagtgctgtatatatctgtgatcacatttaacttttataacaagccaaatgagcaggaactcttatctctatcttacagacgaagaatccaaagaccagggacagtaagtaatttgctcacctggtttgccagcctccatgacacatcgccgtccagttctgcctttaattaccaaagcacaacacgctgctttgattcccctctcctcggcgccagaattcaagagtgaagttaaaccgcaagggctgagttagaagattggcctcagttccctgttcccaccagcaggtggcaccgtctcctagcggaattcttacttgaacgttttgcttccatttctgcagaggcatggtgaacacagttacaccaccaaagtgttcctcctggctgagtttgcctatcttgttcagtgaagacaacccatgaggacaaatggtgttaatgagaagcttttgcggagttacagagatcctcgtatttctttaaaatacacctaataacgttaactctgcaataatttgtagatcatgttaaatcttagctatcttcctcttgccacccagtgtgcttcaagccacatggttcagagcaccatttaatgtgaaactccaattttaaaacaaagtgaaccttccttttacaaaaccatgagacaagttacagagtaatgaccacccacatgaccttgaagtgattttgagtgagtgagtgtaacttccgtggctgccatttaaattggattcaaatccaaatggctccacctccatgtcatcagacctcttgtgccctgattcccttggctaagttcacagtaccttccacatcaggttgtggcaatgattacctgaggttaatacgataaaagcacatggtaagcactcctaaatgatagccaatataaagactcagttctcccaattccaagggtccccaccatgatagaaaaggatcttttggtaaatagagtatgtttagctcttgctaggtctttaaatactttgctgggggccaggcaccatggctcacacctgtaatcccaccgccttaggagactgaggctggaggatcctttgcggccaagagtttgagaccagcctgggcaacacagcaagaccctatttctacaaaaataaaaataaaaattaaccaggctttgtacacacttgtagtcccattacttgggaggctgaggcaggaggatccctcaagcccaagagttcaaagctgtagtgagctatgattgcgccactgcactccagcctgggtgacagagtaagactctgtttcaaaacaacaacaacaaacaaaaacctcaaaacctctttgttggacttaacttccagctcctccatgtagtaccttagtacccttgcagcccgtttctcttttacaagacaacaatgttgttataaactcatttggatgtggtcccgtggaggagtatttaccagaatctagcttatttagcgtcttcagaacacggcacttgcctggaattatactgaccccctcaacccataccaaccacccagagatggctgttcttggctcctctccctggggccctgtccttcccacatcgtcttcttcttctttcttcttctttcttcttccttcttcttccttcttcttccttcttcttccttcttcttccttcttcctcttcctcttcctcttcttctttcttctttcattgagacagagtctcactctgtcacccagcctggagtgccgtggtatgatttcagctcactgtaacttctgccttgtggattcaagtgattctcctgcctcagcctccagagtagcagggactacaggtgtgtgccaccacacctggctaatttttacatttttaagtagagacggggtttcaccatgttggcaaggctggtcttgaactcctgatctcaggtgatctgcccgcctcagcctcccaaagtgctgggattacaggcgtgagccaccccacccagcccttcccacgtattctggcagggaatgctgttgtcccccaagcctaccctaagaggaagacttcttctggggaaagatgttcactgtacccaggccctgccctggctggagctggcaggaagggtcccagagcaggaacttgtgccactctgcccaaagccagagtccctgaggcacacaccccatcaggcaccaaggtgaattccaactgccagttagtatttaactttccacatacgattagattaaacatgtgggttcataaaagcataggattgcagactgcagttgcaagggcttagatggttgtaaggtgaaggtgcccagcaggctgaggcttgtgtgcaacccagaagagagctcgctaacgccagcaagaaggttcagaacagcctggctttggaaaggaatttcatcctgcccacacactgcataggtaagtcttagcacacattctttattttttgaggaattaagtaacaaagttatctatgtgccttttccagaaaatgataaaaggaatgattttcctggtacatggcctggctcctcatccactcttccttctttccttcttgtgttttccttactcatttctttgttaattgccttagaatgaaaattttgagagtttttaaaatggaggattcatggtaaacgtaggtaatcatattgttttctcttcttgatataaaaatgaaagactttgctgccttttataggcccaggtgatgtgagcgatctaccatgtttcaagaaaagaaaactttggggctgggcgcggtggctcacgcctgtaatcccagcactttgagaggctgaggcaggcggatcacctgaggtcaggagatcgagaccagcctggccaacatagtgaaaccccatctctactaaaaatacaaaaaaaattagcctggcgtggtggctggcgcctgtagtcccagctactcaggaagctgaggcaggagaacggcatgaacccgggaggtggagcttgcagtgagccgagatcacgccactgcactccagcctgggcgacagagtgagactccatctcaaaaaaaaaaaaaagaaagaaaagaaaactctggactttggggtcaaatgagtgttactttcctaatagtgtcctgattgctgttgtcatgaataacacacattcatgacaggaatggctggaattaggggatcattctgtagcctggagacagggcacaactaatgacatgtgtaagctcaaatcatggtcttgatcttatgtcttgtacccagttgagccaactggtcacagcaatgaaaacagtgagttattggaatgtgtgacctctgctaggacagtcagtgctggacactggcttgggtgatgtgagttctagtccaggcactgtggccaacttgagaggcttgtgatcttggacaggtgacttaagccctctaggctatagttattccacctatcagagagcaaaccagcctaaatgatctccaggggcccagcctgtgctaggactcagcaagaagcattcactggaaatgtaggtcctcctaggttgatacacatgaattgcccatatttgaccatttctaacctatataaatggctatttcatataattccagagaacataaatggtagttgtcttagcattactaaagtaaatgcctattatgatattctacttaggggtaggataagtatgtataccaaatatggtttgtttcgatttgatttttgagacagggtctcactgtcactgctgagtgcagtggtgtgatcatggcttactgcagccttgacctcccaggttcaagctatcctcccacctcagcctcctgagtagctgggactataggagtgtgccatcacatccagctatttttttatgttttgtagaggtggtgtctcgctatgttgtccaggctgatctcgaactcctgggttcaagcgatcctcccacctcggcctcccgaagtgctgggattacaggtgtgaaccactgtgcctggcctccaaatatggttgatgtctatcagtcagttaaacagtaattctgggaataaaaaattgaaatcaacccacttataattggaatgtcttagcataatgtccttcaacgaagctgctttcacacactgtgatttgtttttttcctgtggtcatggagcaggcatgggccactcggccacatctcatgcatccgtattcaaaagccaaatcccttttggatcctgtttatttggcctggccacgggtgagcacttagacatttaatccctataggccctttcatccctgtgattaagtcttatcaaaaagcacctcctgaccggcttagcagtggggcctttgttcacattagaagggttgaacaaataatgggcagttggggctgcttagctctaaaaggctggtgaacgctgccatgcctgcacctggaaacaaacccaaatgactccagtggaattcagcactgaagtccctcatctcaaagaccttttgtggcagagactcttggatgggccttaggggtcccaggagtcccctgaaattgaatgtagagcttcctacgtgcataggtatactttcttggggaaaaattaagtcacatcattttattttacttttcgagggatctttaacaccgcccctcccccacccccaattcccacaccccttaagaataaattaagaatcactgttctggtagtttccagttgaattccacagaggaactgtcattcattcacaccttcattcaacagatttttagtaaagatttgctacgtacccatcgctgtgtagggtcccgggattcagagatgagtaaagcaatccctgccttccgggggctcaagctctcctgtcatcgggactcagttactgaatctcactaaacatcctgaaggtaggagtttatagagtggttttgaggatcacatgaataagcacacaatacatgggtaattcaaaaacgaaaacaaggccgggcacggtggctcacgcctgtaatcccagcactttgggaggccaaggtgggcggatcacgaggtcaggagatcgagaccatcctggctaacatggtgaaaccccgtctgtactaaaaatacaaaaaattagccgggcttcgtggcgggtgcctgtagacccagctactcaggaggctgaggcaggagaatggcgtaaacccgggaggcagagcttgcagtaagccgagatcgcgccactgcactccagcctgggcaaaagagactccatctcaaaaaaaaaaaaaaaaaaaaaaaaaaaggaaaaaaacaaaactaacatggtcatttgcagaaggggcagaaaaagggtctctgcctagacctggggaggtcagggaaagtactatggattggtaacaaccggctgggcttcctacaagagaaaaagactatactcacagagccagaccccatctcaaaaaaaaaaaaaaaaaaaagtctggcatggtggctcaaacctgtaatcccagcaccttgggaggctgaagcagggggatcacttgagcctaggagtttaacaacatagtgagacctcatcactacttttttattttaaaaaagagttaataaaaaataaaatgaaaataaaagggtaaaagagccagtggcaaagtcttgagtggattaaagccagctcagctaactttcacagcagactatatcattttaaaggggaaaaagcacatctctgttacattgcttaggaaatatgcttggtatataccctggggcaatcttatctatttgttaagtttccttccaacccactagcctgtgtggccaggagagggagacaaagatcttagagctctctaaataatagaacttaaaacatcagacagagaagagtatattatcttggtgatggtaattctcaatgaggaaaatcctggggagggatgttctgtgggagaatgcctgcaagtttatttgtttagtaggtttgattattcagctgattgaaattcctttcccagatggggagatctgattctcttttcatgaaggaaagaaaagtcacatgctaaagagacgggcatgtctttagaacggcagcaggcaaacccactgctgggatcctggggcttttactagtggctagtcacaggtttacctcctgcctgtgctccttctagctgtgttgaaacccacttgccccatctatgaaccgtgttcagctccattttctgagcccccttatctttttgtccatacctgttgcaactctttgcacgttgcattgtcattgatttggtctctcccattcaactgagcctctcacagagttcctgtcacctctgcagtttcatcgcctagcatagtacctggcactttaattcatgcatcaaatgtccattgagtgccttctatgtgttagacatctgctataccgagctagacaaagttggcagacatgacagccgagtggaaaagatgagcccctaaaccaataatcacacacacacacacacacacacacacacacaatatatatatatatatatatatatatatatatgtatgttatatatatgtatgttatatatatgtatgtatgtatgtattaaaaaatcttggccgggagcggtggctcacacctgtaatctcagcactttgggaggccgaggcaggtggatcacgaggtcacgagatcgagaccatcctggctaacatggcgaaaccccgtctctactaaaaatacaaaacattagccaggcgtagtggcggttgcctgtagtcccagctacttgggaggctgagacaggagaatcacttgaacctgggaggcagaggttgcagtgagccaagatcgcgccactgcactccagcctgggtgacagagcgagactccgtctcaaaaaaacaaaaaatttttgccttgcaatcgtttgccttgatgttatgtctaaagccccacaattctctaaaaacagagatgtataaaaaagcacacgtatataattctctgaaaacagaatataaatgagtcattgctccatttaactgacatttgttgagtgcttgttataaatatggcattattctagctggtgtgaggttaccaattttttttaaacaaaagtaatatgaatatatacacacacatttagtgactgcatatgtgatgtgtgcttttgaagaaaaaggagatgctgttggaggaaaatggtggtggtggtgggaagtgatttagagtagaaccagggaagtctcagaagtgacaactagctggaacctaaagaacgaggaggtagcaggtggaagagaaaggcaaaggcattctaggttgagagaataggatgtgataatgtcccgaggaaagagagcttactgacagggagggaagatgtcaggtgtgaccgaactgtagtgagcaaagggtaactgaggaggtggtcaggagcctgctcagccaatggggtaaatactgttaaggaattaggacttgattttaagaacaaccatcgcatcattttaaaagcaaacaaattgcactataatttccctcttcaaaaaggcacattggctgtgcacggtggctgacacatgtaatcccagcactttgggaggctgaggcgggtggatcacctgaagtcaggagttcgagaccagcctggccaatgtgttgaaaccccgtctctaccaaaaatacaaaagttagccaggcgtggtgacatgtgcctgtaatcccagctacttgggaggctgaggcatgagaattgcttgaactggggaggcggaggtttcagtgagcagagatcgtgccaccccactccagcctggacgacagagcaagattccgtcttaagaaaaaaaaaagggcacattgatggctattcaaggcagagaggggcacatataaccccaaagagatggctctggggagggttgtgttgtattacattgttggcattgtattatccaggtgagagatgctggaggctgggcggtgccagtggtgatgaaaaggagagatggatttgaaacataggaataatctctcagattgtttcttggcatcacttacctaaaatgcttctttcaaatatagatgtacacacccctccctttaggatacttgggacaatgtgccacttagacataggggatggaacaaattggagagtctgtcaatgccccctgcaatcttttctcttgatgttatctcataatgccccacaattctctaaaaacagagaacataaatgagtcattggtccattccactgacgtttgttgagtgcttgttatgaatgtggcattattctagctcttgtaaggttaccaattttttaaaaaacaaaagtaatgcaagactgctgatgaaaatttggaatatgagaaaagcataaagaagaaaatacatatctttaagcacaccacccactgttaacattctgatctatgtacttctaatattttctccattttcatatgtacacatacatttatttacatgcatatataaatatcaaagtgtatatatataattttctctgccatttaaatttttactgtgtaacaatcatggattgtaaaaaaagtgaataaaatgtacgcagtcagtttaaagactaacaaaatatgcattaaatcaccagccaggttaagaagaaatactattacttataccctggcatctccctcccacctttacatagccaaatccagaaaagatccgttttcctaaccttgttcgcctattttattatttaaattgcagcaggagggaagcatgtctactttatccaatttcacacagacgctggaagacgtcttccgaaggatttttattacttatatggacaattggcgccagaacacaacagctgagcaagaggccctccaagccaaagttgatgctgagaacttctactatgtcatcctgtacctcatggtgatgattggaatgttctctttcatcatcgtggccatcctggtgagcactgtgaaatccaagagacgggaacactccaatgacccctaccaccagtacattgtagaggactggcaggaaaagtacaagagccaaatcttgaatctagaagaatcgaaggccaccatccatgagaacattggtgcggctgggttcaaaatgtccccctgataagggagaaaggcaccaagctaacatctgacgtccagacatgaagagatgccagtgccacgaggcaaatccaaattgtctttgcttagaagaaagtgagttccttgctctctgttgagaattttcatggagattatgtggttggccaataaagatagatgacatttcaatctcagtgatttatgcttgcttgttggagcaatattttgtgctgaagacctcttttactttccgggcaagtgaatgtcattttaatcaatatcaatgatgaaaataaagccaaatttgaagtaaagtgtctgggcagtggctgtggggatagaaaggagagatttacaaatcattgaatcttctttctcatgaaacatcatttgtgtgtgacaaattcaatttataaataacccagatgtattatgtagaagctgaggctcaaaagctatcacttgcttaccagacggacataggagcatttatctgtaatattaattcatgagtgtggagtctgaagagatgaataaacaaaccataagattactttacatttattgttttcctggcctttaacctatttagaagtcttaagacagaacaaacatttttctttttctttttctttttcttttgagacatggtctctctctgtcacccagcctggagtgcagtggtgcaatctcagctcactgcagcctcaacctcccgggctcaagtgatcctcccacctcagcctccctagtagctgggactacaggcacgtgtgccaccacacccagctaacttttgtatttttttgtaaaaacagggtctcactatgttgcccaggctggtctcgaacctgaacaaacatttcaaaggacaaataatccataccagagaagtagagtatttaagaagtacccagtataacaaaacatattttaaaactaacatttaaagttttgcagaaaactaatcttaaaaagttctcattatttaagaaaaaaaaataaaaagttataatgtcgctttaaaaatgtattcttttaacttgatttagttttcctctatttataattagttgttagcatttatgtttaagaaactaaaggatacagaaagggtctaaattgctgatgccctctgaagacctagacaggaactacttaatatcttgcaccatgtggtgcaggatatcatagaatgtcagggctgatcattctactgttggcagagaccacttcacttacagatgagagaagggcagtccactgagaggagacaatttcattcactaattcggtcaggcaacattgacctacttggtccactggcctagaccccaagagtataaagatgagcaaggccgggcacagtggctcacacctgtaatcctagcactttgagaggctgaggtgggcagatcacctgaggtcaggagttcaagaccagcctggccaacatggtgaaactccatctctactaaaaatataaaaattaaccgcgtgtggtggcaggagcctgtaatcccagctactggggagactgaggcatgagaatcacttgaacccgggagggggagattgcagtgagccgagattgcatcattgcactccagcctgagtgacagatgctaaacatcatagtacaatgtgacaaggtcctaacagagatcaatgcaaaggggacacagccagccagcacaaggacaggagggcatgcctaatgcaggtcaaggtcttctctctcagagcagctgagagtagcaggtcaatggcagcagagagatgtggggcctcagcatcccatggcttcatgcctcctagtttaccctgttctcctccccatgccccagccaaggcacagcaacgatgggcaaggcctcaagcctcagggtgctaggacaaaatttagaaaaagaggctcttcttcagagaatgcttgtagaactcgttattccaatcacaaggtttgtctctttaaaattacagagtgagatatgtacaaggtatctacttcctaataacagatttgcaattatgccaactgaagcattcagtacagttagagaaaaccatccatattccaagagcagatgtaggaagagtggcttccctcctcagatcagaaacccagaaatgttgtcccacccagaaacatccatctcagagaggccagagcagccatcaggctttaaatcccagccctctgctctgcatccagacagaaatccgaggtttccatcaggtgacaaagaccctctccttaaccaaactgtcaagctcctctgagccctcttcttgactagagcccaaccatggccctataaaaactgcagactctcagcacacatgatttcgcccacctttgcacactaagagacataaacgctagcataggttctaagagctgaaagctaaagcgcctgcccgagaaaagtgaatgcggcctgaagaatttactaattgttccaaccaaaacctggtgacaggcagatagtcccctgatccctctcttaaggcagttactttagaaagtttgcaattataaatcctttctctctcccttgagatgtatatcttctaccattcagaactgtattgtctctctgaaatgcaaacattcaaactctccttgctggatgggtgccttgctctaacttactgctccccatcacagacagaagtttgtttctactctagataggagccaattaacaaacccagatcacactgaccaaccccttcccactttctatgcatttccacttcctggactctgctcaagccccatccccactcagttacctttgcacaaagggaagttgagctgggcctcttccctctggcaatagctaatgatttcagtcaatccttactgctttaactggctttctttacctttgacacaggtaaacacatggagagcaaaatcgaggtttttctggccgggtgcagtagctcatgcctgtaatcccagcactttgggaggccaaggtgggaggatcacttgagctcaggagtttgagaccagcctggccaacatgatgaaaccccatctctactaaaaatacaaaaattagctgggtgtggtggtgggtgcctgtaatcccagctacttgggaggctgaggcaggagaattgcttgaacctgggaggcagaggttgcagtgaaccgagattgcatcactgcactctagccttggcgactgagtgagactccatctcaaaaaaaaaaaaaaaaaaaatcgaggttttcctaattaagtacattttattatcatcactgaaagtacaggtggtaacatagagggttatcagccaacttcacttttggggaatgggagaaatgctgactctctccaagcatgttgggtgtctagtggttgaagccatttgccaagattgtcaccctaggatccactcccaccaaacctgggcttttcactttcaacccagcaactgaaaatgccagttcaaacaacttgctgtttttttctaccccacttgcttttagagttccttctgcctgttttattggctccatataacctgaataccacttatttcttaaagcatagctcagatgctattttaaaaggagcccaggatagtggctgatttgatagaatctatacccagattacccagggtcaagtcccagctctggtacctgcggcctttaaaaccacgaaaaaattactttaatctctgtgtctccatttcctcatttgtgaaatggttatcattatagcacgtcccttacagccttgttatgagacttaggcaatagccactagtgcttagaacaaagctatttttgtaactttctccaggaacacttcccttaacagaaccaacccctccacccctcagtttgttcttccctccacaccctctaacattctaacataaccacaaagagtcctgatgggatttggagttacactgcctgggttcgaatctcaattccgccactgccattcgcgcgttttctattgccagccaccttactctcccctggcctcagtttcctcatccttagaaggggagcagagcacatggtggtaactccctgcacattcctctctttccttgtattgggtgcccagtttgtgccctcacatggcgctagcactgagtgggctcaaactctgtacgcgtttactaagcatattgactgaagaaatctggaaacctagtaccgcggcaccatatcgttaccccaaaggaaaatgcatgcacgctgtcagagatgacgaacactgcgtctggaaacttcttaagggcacccacgtgtcctcagctgcagacagcagcgaggagacacccagggaattcgagacagcggaaggcggaagggtcccgcaacaacccaccctccagctcaggtgagttcagagtgagaacgcaccgccaggcttggacaaaggcacccggcctacaccccagcggctccccgccggggcctacgtggacttcagcctccagccacagggacaagagctgctggccagggctgcccgcctgggctcactgcgcctgcgcagtgagcagcgcgccccaggtcttctgcccgggcccactgcgcctgcgcacggagtagtgcactctcgtcggcggcaccggcccactgcgcctgagcacgtagcggtgcatttcgggacctgtagttttccccggcaggacggtagaagtcgtggtttgtgcgcggccaggcgctggagcctccgctgccgggagcagtaagtgtgtgacgtcggggtagaagggagtgacccaaattccaaaagctctttgggatgctgcgatgtcgcggccggccccgcgctcgggttttccctcctagacaaaagtctgccggctcccggtcgcgccgggtcggggatccggaaggtgaaggccgccaggccccacctgcggggcgcccctgctggacctggccgtcgggcgccgtcaacccgttgagcagcgtgttccggctggcacgtggcccgggcggggcccaggattggttcaagcctacggtgttggtccccggagagtctagggagacaagcaatcccctggaatggtgggggaagcgatgacagcccctggtcctcatccgcagctctgggggaagtcggggggtggggagggcgggtgttgctccctgagtgttgggggaagggtatggggagaggaccctgaactagcccccaggttacccaggaggagctgaggcccagagaggttcagcgactcgcccagggttgcacagcgagcacaggcaccgacgtcgccctccgaggcctgggcttccagcagggagagacccggacacctgtcatcgcttctcggtggatccctgaaatgttgagttgtggagtctgggcagctgagatcgggcagggctggtttcttgtaggcccaggcttccgtgtagagggccaagtgatgcccaaggttcacctggcagccccctctctggacctacccctccttatgattgggtgaagggttgggtgaaaagggtagaggccgggaatgagaacagcttcagaaagctcagacaaagggcgcagcatgattcgtggctggaaggagacagcaagcgatagactgatccttgaatttgttagtgtgccaagaagaaaaagtattaatagattgtggacgacacattatccatattgctttagttggtctaaccaaaataagcgaatagcttttttgtttctaagagaaacctgacaaaggaagacagggtatttttgcggtgaaggaaatagaaatatttggagttgtatctaagccacttgttacttttgtgttttaagctaagatcatggataggtccagggaaagttaaaaatttcccgcacttcttagattttatgcccctcaaaaacatccccaccttgttggcttttgcagttcaaccttcagataccagctccctcgtttctaatattgcattaggtgtacatatggcagcagagcaaatagcttactgatacttttagcttttttcttctcatttgcaaaagactctatgaaaatggctggcttgggcatgtaattgaagggaggtggggaaaagtggtaattcagaggcagtgggtgggaatgagcaaagcatgtcagtgtggttcaccctcttgactcccacctcaccacagcccttctgctacaattgcagattgactctaaatatgtttctttcctaaagagcttgaattttatcactccaggtatgaagttgaggcagctgccagtatattttggcagtcaggttctgtgatatcagagaggatggtgaattgtgaattccagagttgcagaattgttctttagattctgattttttaaatgacagcactttggtttggagggttaatgacttaccccaggtcatatgccacaccatgggtaacaccaagagtagagctcagatctccagttgtcctggtcctcaggctactgatctttattccctgccctgctatcttggaatgactgcattttgccctggatgtcgctagcctgtatccttcaggttggcatgtccagtcatggaaggagagagatttaacataacaacaatggctgacattcagtgctttctgtgtgctggccatggtgcttagtgtttacagtctaatctgcaagagaatttacagatgggcaagttgaggctgagagaggccaagtaacttgtccaaggtcacactgctagtgaacatagcacatgttttccagagggccagaccactggatgttttttcattcatttcctcctgtaggatcgttggacctatttctcgttcttgactttgggaatcaatattctacgtacatcaattcactgggtatgcagttttgcctctgaaaattttgagggaacagccagactcatctactgtatttgtatacaactcaattaaagcaggaattgtaaaaataaaatttgtaagatctttaacattttaatatacaacattagctaatcactaagattactagagatactcaaagtgaaaattgtagcaacaggttataacatgttaggagcatatttctttagggcagtcagaatctgctgcttcttaaagacaagtgggccatttacacatgaaggtaacaagcacattcagccaccatcattatagttaaacagatctatgatttaaattcctatcgctaccttatctgactttgaaaaagtcatggggaaaacttggctaccttgtgccaactgctagcttgttttcaagatattataatcttgaatagatggaggatgaactttttatacttagatagctttgtaattgaaagtttgtataaaaacatcttgcctgaagttcatcttatccccattctatctaaaggcctttgaaattttcagccacttttcttaattatgacggtaagtacatttcaagagaagtgtttccctgacttttgaatgcaaagctctctgcctgtgtcaggatggtgccgaggttaaagccctggagccagactggatgggttcgaatcccaggcccacctgcgagaccctcgatgtgttacttaaattttatttcctcctctctaaagtggaggcagtaagctgttttatggggtagttgtgagggctaaatgtcttaactcatctaagcactttagccacttttttccatctgacacaaaaaagttaagctatgattattgtgctataaagcattggatttcagaagaagtaggggcactaaacaccatctgcttgacacctttcttcacttacagatgggactgaagctctagagggaagtcacttaccagagggtgtaggttcttcatccagagctgaagtcttcttgggggtatgtgtcatattctaagagtagggacctacaaggccttggagcgaatcccaaggctcgggctgccagccctgccttctcatttccatatgccatggtgtggcatatgacctggggtaatatcctctgaaccaaagtgctgtcatttaaaaaatcagaatctaaagaacaattctgcaactctggaattcacaattcaccatcctctctgatatcacttccttccctaccttctactaggtctccctcaagctttagagaaaattctgcctctgaattattgcatctgacaatttttctgccctgtcacttattcccttgctcccagataatcttcgaaaaaccaagatgagtttaattaacactcagaggacttgacaaagacactcactcccaaaccagcttgcgtttaggtctggaggcaggtggagggacagattttagacttgggcccttaggttcacagatgaatgggatgggagcccatgtcccctcagaagcggcgctgtgctgctggcggctacagacagctggtgaggagagctttctgcttagcaagggccaggcccgtctgggccctcgcccagcccatccacttcccaccagtctctcaatcgccttgtcaggacacagcccacctctctgtggagctcactttctgttcacattccctctctccatcaaagagacatctttctaaggtggtctgccctaggaactccaaattgacctgcttctttcttcctgcccagatcagaccttccagctgcctctcatgtacttgtctgttgggggcttgtgttgatcaggagtgaattcacagtctaccatgaattggaaggtgagtatcgttttaaatatttatggcttggggttttttcttcctcctgattgtgaaaattcagaataacagttctacaccagtagcttgattaaaaagaaaaagtaggtgaaagcataatatttatgtttcattttaagttaaaacataaatgtacatttattcgctggacttctggaagaaggccaggccttttcttcgagtgtgcattcactaacttcaaatcttcctcacttttcttacaaaaactatacctttaaagctttacctgcaattttgcattgtgctttctttttttacacattttttttgtagagatagggctccactatgttgcccaggctggtcttgaactcctgggctcaagcagtcctcctgcctgagcctcccaaagtgtcgggattacaagaatgaaccactgtgctcaggccgttttggttcctttaaagtagatgcagtggactgaatgtttgtgtttccccaagttcatatgttgcaaccgtagtgcccagtgtgatgatatttggagttggagcttgtaagaggtaattaggtgatgaggctggagccctaatgtttggaatagtgagcttattaaaagggctccagggagctctcttaccctctttctgccatgttgggggtacaacaagaagccagccgtcagcagcctggaagaggactccgctagaacccccctgtactgcgccctgatcctcaggctttcagcctttcgaactgtgacaagtacctctttaataagtcacccagtctgtggtcctttgttctaggagctgaattgactaagacagtggattaagatcttatgagcagtgcatacacaaaatctttccagtgtttcatactctttcctaatcttttacagttgacttgccaacagcattttttttccaacgcaaacttgagtctttcaaagtattcaacttagttttcataaaaacttttgctttacacagtcatatttcacaagcgtaatgtttaaataagttatggaacatagtatcaagtacaacttaaataaactgcttggcgagtaaacacacctgacccctgtgaaacattagattcagctggtgggagcagaagttcaagggcagccagagagtaggtcagcaatcaggttccaccgagggaaaggagaatgtcatcttaagtcccggaagtcaataaggtgaggtggaggttgtttaagagagcagccactaaaatatattatagtcactttgcaaagtctaatatcaagcaaaaatcatacattgtctcaccatctagaaatggctactattaacaatctcggtatattcatctttttctgtatatatgtgtggcgtgttttcatgcataggatcttattttacgtgttttttcaattattataagcattttcttcaaaacatccagtggttttctattgcaaggagaaactggaaaggtctggaagcaggatcagggagccaggaaggtagctttcccatcttccccagctgtgtggggtgaggggctcggcaggccctgcaggagggctgagggcccaggaacttgtgtaagttaaagatggcagagtgagtgagctgtgaagggtgggaagatatagaacagtttgtttagcatgccttgaggatcagagctcacagtggaaaggttgggaaggaaagaagaggcagtgagaggatggagaggggaaggagcggaaagcagtgtggggtgaggtttagggaggtcattcgcccactgcagtggctaagtcagtagaggagagaggcagtaactggtactaagggccagggttcaaagcattaaacctcatgcctcaaggtggtgtttctcactcctgagcactagttaaggcaaggatttcgagccccactcccagagtttctgattgggtagatctggctggggcctgagaatttgcacttcttataagttccaggcggtgctggtgcacactggtcgaaggcaatgcgtgggaagttttcctctttaattgtagagtgacaccaacccatgtgaccactcgggccagtcttgcttgtgacagttttttctgccatcaggaacaaagtctgcccaaaccttcccagcttctgcaccagggaagtggctaccagggagcagcttcgtgtttaaacacagccccatctcgtgtagtgttagaaaggaatggccgcaggccgggcgtggtggctcatgcctgtaatcccagcactttgggaggccgaggcaggcagatcactttgagctcaggagtttgagaccagcctggacaatgtggcgaaaccccgtctctacaaaaaaatacaaagattagctgggcatggagatgcgtacgtgtagtcccagctactcgggaagctgaggctggagaattgcttgagcctgggaagtggaggttgcagtgagccgagatcatgcccctgcactccagcctgggcgacagagtgagaccctgtctcaaaagaaaaaaaaaagaaagacagtcatggccctgattgcagagagctgcagaaggtggaaggttcagtagcccccagtgcgtctggtggccttccccctctggctcagtgggccatggccggcagcgacagtcaacagtgctacctgtgcgttagcaacaagtatggcctcattatttaaaaacttagttattcccatttcacagatattggggttttgtttttaaaaattgatgtagatctaggccaggcatggtggctcacccctgtaatcctagcactttgggaggctgaggtgggcagatcacatgaacccaggagttcagcaccagcctgggcaacatagtgggaccccagctctacaaaaaatcagaaaaaattagctgggcgtggtgtcatgtgtctgtagtcccgtctactcgggaggctgaggtgggaggattgcttgagcctgggaggtcagggctgtgggaagccgtgatcatgccactgtactccagcctagttggagtctcaaaaaaatattcatatagatccagtccaccctggcagcattcattttcctccctgaaggtctgtatgtttcaagagatgtaaggggtttgttaaaaggaaattggaggaaggggttcataccactgaaggttagtgcctaagagaggggcaggaagggggccctggagctcttcgctttaccctgtgaatgttcttgacctctgctgcccttgtgctgcgtccttctcagtccacacttctgcctcttgccgtgcgtctccactgcctgtaaaacaaagtgaacactgaagcctcccactagggtccattggctgatgcgtttccatttccatgggttttctaacttctggatgagagagtacattcctgcaattgctaaagctaagtttcctatctggattgtagacagctatgggcagtaacatgggctttgttatattagtaatagggccccggccaggtgcagtggctcacacctgtaatcctagcactttgggaggccgaggtgggcggatcacgaggtcgggagttggagaccagccggccaacatggtgaaaccctgtctctactaaaaatacaaaaaattagctgggcatgatgccgcatgcctgtaatcccagctacttgggaggctgaggcaggagaattgcttgaacccaggaggtggaggttgcagtgagctgagatggtgccattgcactccagcctgggtgacagagcaagactctgtctcgagaaaaataataataataatagggccccataggtttattcagagagactgagaaagctggaagagattagcttttcccagtgtgagtcattgcctcaggtagcctggaaaatcctagcaaacaaaaagaagtttatacaacaacattcttttcatagctggtttgtatgcatggcgtcaaaccttcacctctaaaatgtgaaccttcaagaaaacaggatttcagggtttactggagggaggggattagcctaggtctgagggaagaagaacctggaaatgaagtcagtgtttaaagctccttatatttaccagagtaaaaagttgaaaagtttcacttttggaactttttagtcttttgtactgatgccagagtgatctttctgaagtgtatgtgttgtgcttattctttactgttaaaacgatatcatggttgaaaactattagctaattactgagtgttcttgtgttcttactgttttagtaaaattaaaacgatttaagtatttgcgtccctgcctcctcccatgattttcattgtatttctatcatatcatgctatatccttctgcaaatatccatacataaccagttaaatgatttcagaggtagcgagtctagttgcctctggaaaattcagtagccaagccatagtgtatttgcatattgtaaatgtgaagtggatgggtgtgaggaatgaatcatatatagtacaggacagcgtgatgctacagagttgggctttggagcatttggagctgggtcagccctgcctcgctgactgctggcctccccgcctctgcattttctcggctccaccgcagtcagggcgagccatctgctcatggaggtggctaagggcagaagggaaagccgcataaggcactttgcatgccgtgagttcccagtctacagcagctgatgctacagcttctaagcgtgaaatccacatctagttctgagtcataaagagtttcgatacaatcataggaacattcatctacatacactgtgatttcatgaatttcagtttgttgaaaatcaggcatcagtggaagggagactggccccggggttagaatgtccttccaactggctcctcatgagggagctgtgggaccttcaacctctcaacctccaggagctcttctttccttgctcatataaccagggggttgagtaggtccccttgaaagttatttccagccccccggttctgtgagcatattgtacacactaactaggttcagatcaacttcggttagactattagagggaggtgcacatgtatcccccacagtggaatctcattggtatttcatataataagtgattgacagaaataaggatttcattgggataaaatcctacctggtcctctaaaataatgattgctcaaccagagcataccttttcactatttgggagggaatttttaatcacacaaaaagcacatacatatcattcaggtcatgctaaccatgtgtatggaactaatattgctttgaagtactatttgcaatatatagaatttcacacaaaaaacctactagtgcaaagagtgagtaattcaaatgcatagtgtttccctagactttattttagtgaatggggttgcaagagcagttagtaagtagccatgttttaatgttttgagttctgtcgtgttttattttaccagcaagtgccagtgctagtgagtctctagaaacaagagaaaatcccagagtactaaagctgcagtttccagaagcaaggtctgattcacccttactttgtagatgaaggggcaggagctcagaaagaaaggagctcattgcctgacccaggtcacacggtcagtcggtggtaaagtagagctctgacccaggcctccgggctccagctcctttcactggatctggctgctgcctcagaagcaagggcctgggtgatcagcaggttgcacggttgagctgtgagagaccagagtccccacgcctgtggatgaccggtggtcccctccatgaagccagccgcaagcaagcagcaaagagcagagctgtaacttgactgttggccccatggggatagagaccttttctgcttggtctccagtgtagctccagccccctatcctcgtgcctgttgcagaataggtgctaagtaaatatttgttgactgaaggatcataaaagaaacctcccatatcggtgatggaacatttagttagcatggcttctttcttcttgaaggttcttgagcacgtgcccctgctgctgtatatcttggcagcaaaaacattaattctctgcctgacatttgctggggtgaaaatgtatcaaagaaaaaggttggaggcaaaacaacaaaaactggaggctgaaaggaagaagcaatcagagaaaaaagataactgaaggtgagtccacagtacccaaccttgcaaatgggagctggccagtgggttggggtgaccaatcaatgaacaagagaggtctgagacctccctgtccgtcgggtctgaagggctgcgtgggggcatgtggcctcacctgttctctaaggtagaactgctccataaagggccaggtgtgcagatcctggtcctgggatgtgagtgctgctgagccaaggtgcacggagcattagttcatccttcttgaaacctgcggtggcaatggttcttgacaggtattgggttaagaattgaggactcagtgacagctgtggaccttcttcccagagaagcacacatactgaaaccatctgcatttgtgtgtggggagaagtttgcagatgtggggagtcacaggtcatttgaaattccaagattaagaaaccctgttacctttaagataaagtctgactccatggtatgacaaataaatcccttcccagtctggtcttaacccagacctcatttgccacatgtgcccactccccatccccctgcaggccattcctcagccaccatggcctttggccttgcttattaggttcttcccaaggacctcctcaccaggcctgagggtacactcatcgttgtcacccagtgcctatcacagtgcacactggtgggcttagaacacacttggggagttacaatacatcaaggcaccagaaagttcctgttaagcccctgttacagatttaacacatgacaattcacagttaccttgattccagtgtgttgatgcagtttcttcactttgcaggttgagttctgtactttaaaaatcaggggattcagccaggtgtggtgactcatgcctgtaatcccagtgctttgggaggcaaaggtgggaggatcacttgagccaatgagttcaagaccagcctgggcaacatagtgaaaccctgtctctacaaaaattaaaaaaaaaaaacaaaaaaaaccaaaaaaaaaaaccaaaaaaaaacttagctgcacacttactgggtgtgtagtcccaactactcaggagactgaggtggaggattgcttgaggcccagaagttcaaggctgcagtgaggcatgatcacaccactgcactccagcctgagtgacagagcgagaccctgtctaaaaaaaaaaaaggattcaaatatggtggcggtggggttctagatctgtggttcccaaacctagctaatgatcagaattgcccaggtgtttgtttaaatgaagattcccagcttcagcccagagagattccataatggctctggttaggtttgggtgttggtttttgttgttgtttttaagataggggatcctactctgtcatctaggctagagcggtgcagtggcacaatctcggctcactgcagcctcagcctcctgggctcaagcagtcctcccaactcagcctcccgagtaggtaggactacaggagcacgccaccacacccggctaggtttttaaaacaatttttagtagagaaggggtcttgctgtgttgcccaggctggtcttgtactcctgggctcaagcgatactttcgcctcagcctcctgaagtgctgaggttacaggtgtgagccactgtgcccagcctctgttcttttgaaaacccattagataatccttaggttgtcttctcagcaacaggtcattgtaggaaccactgggctaggtggcctcccaaacccagcccactctgagattccatgctgaattcccttgcagtgccgtcaggcttgttgaggctaaagacctactgatgaggaatagtagcaacacctactaagtggttattctgtgctggggactttgctaagcattcatgcacaactgtgttattcagccctgatgactctgtgaggcatgttcagattgaaagaatggctctctctacatggtgaagaacagagtcagaaattgatcccaggtcaaatgcattcgatcagcatggccaagcccaagctgtgctaccttcctgaatacaggcaagtgagctcgtagggatgcttcactctgttactcaccacttccggcagctgcccactcgctggtccccagtgaactgtaggcttttgctagatagaagaagttactttctttctttctttctttctttctttttttttttttttttaaggtgtttgattgactgaaatttaggagtaggcattacgatggggaggagagaaattaaaaagggtgagggaaggcagtttaaattaaaatgttgctgattgaatttatattcctgacaatcccattttgtgtgctaaactgatcaaaggaagaaaagatgagatggaagatcataaaggctttgttcctcccacaaacatcagcagagacctgcatttaagtcaggcctggatggcttagaagcaactcagggagttggtcttcctctctaggctggcagcttcttaaagactagagacttgcttcaaacaaaaagcgttttcaggccgggcgcggtggctcacgcctgtaatcccagcactttgggaggccgaggcgggtggatcacttgaggtcaggagttcaaggccagcctggccaacatggcgaaaccccatctctactaaaaatacaaaacttagctgggcgtggtggcacgtgccagtaatcccagttacttgggaggccgaggcacgagaatcacttgaacctgggaaacagaggttgcagtgagctgagattgtgccactgcactccaggctgggtgacagagtgagactgtttcaaaaaataaataaataaataaaaggggggtggggtgtttcagatggaagggaaactgatgctaaaaatacattggttaataaatagacttgagtgatagacttgagtggtgtccgcttgttaagtttaaatggctgagcatacgtctttatgctgagcagtaaacatcgggtatactcttatcaaacatttcctactcatccctttggtattcccttctagattctgccatgtaaatgtcagcttgagtggactccagctgagaagaaagagaagaaagacttaattattgaataatttgtcagaggataaactcccaacctagacctttcacttaaaatagtgtgaatttgtatatgtttttaaaagaaccagtactggccgggtatgctggcttttacctgaaatcccagcactttgggaggccgaggcgagtggatcgcctgagatcgggagtttgagaccagcctggccaacatggtaaaatcctgtctctactaaaaatataaaaattagccaggtgtagtggcgcgcgtctgtaatcccagctactcgggaggctgaggcaggagaattgcttgaatccgggaggtggaggttgcagtgagcctaggtcgtgccactgccctccagcctgggtgacagagcgactgcgtctccaaaaaaaaaaaggtaaaattaaaattaaaaaaaataataataaccagtattttgtttactaaaataaaatgcctttgtaaaaaaaggagtcgtggcctttggaataagtcaaattgtgtatctctttctctttctcttacacagcaccctctaccccgtgttgtaaagcggggggttttgtaaacttacacctcccccaccatctcaagctggggggtcccaggtgagaggcttccatagaggacaaggtggtgcagaaacatctgctgtgggagtggggtccccagcactgggtgcttcggccagctacccccgaccccaggccccctcataggctgccctcccataccctcctttctcgtcttttcctcctacaggtgctacacccctgtgagagtgttttggagtgttttcattgttagggtggagggaggctgtgtgtgtccaggaaaggtgactcctgtgttaaccatgagggtcctcgcagggaggaatcgttgggagccctagggtgtgttttgtcctctcctcacctgtttgctccttgggatttgctgatgagaaatgaagggtagggcaccctaggagccactggaaccaagggcagggaggatgggaagatgttttactcagcacctaacacacgcagatccctgtgacaagagctcatgctctcccacttcttcgcaagaccccagagtggatggggagtgaggtggcagcagctggcactggaagcagtgcggagtgtttggtctggttgctgatggctgcatgggaaacttgcaggagtgtgtgttagtaaacgtctccccgtcctggcccagtttgtgtcgaacatgcgttttccatgtggggagtcaggggagttccatcttaaattgcactgtgcttgctggatgctcttcaggacaatttaggaagcaggaaagaatttacaaagttctgaggacagacagaccctgctcctacaagctgcagtgctcaccatagtcaaagtggactttcacgtaagcccagacctcattctctctgaaggaggccgctccagcctttgccaggagccctggtgactttattctgcctaatcctgctgcggcctggggtcctgttagaacgtgaatggaagaccacagcagaggtgggatgcccttggatttctgccatccccacgctttcgtgacatgctcagatggggcctagaactgaccctgggccgtggcctaccatcctccctttgtcagggcctccttgcaccctggcaggttaccccacccaccctggcccatgttcctgccccaggggcctggcctctctgctgcccaccctgcaggtgtagggtatcacctgctcctgccttgcctggcatcagacctgctaccttggcaccacttcctccctcatgcccacccgcctgtgtgcctcataagtccaaggcgggggatctgctgaccagtagacactcatgtgctaaacacaagcgcttttctaggctttgggatttaaagctacactttggaatttgtggaagatctggccatcttggaaaattaggtagaaggtgacataaggactggactaaaccactgatcatcccaacagtgcccgtggcttttctgttttttgtttttgcttttgtttttttagagatgaggacgtgctgtgtccctcaggttggagtgcaatggtacaatcatagcttattgcagccttgaactcctgggctcaagcgatcttcccacctcagcctcccgagtagctgggactaggccctgctaatttatttatcttttgtttagagacaagggtcacgctgtactgcccaggctgggtgtaggttttttctgaagagcatttgggagttttgtttttgcttggttacttttcctatgcacccttctaccactagggggagatgattaatcactaattgaagggattttgttcgttttttatgttttgggtttttttgtttgtttgtttgtttgtttcaataaagaaagagtttaattgcagtaaggcaggccgcgcaggagatggcgttcttattcaaatcggtctctctgaaggctcagaggttaggggttttcaaggcggagttcttgctatcattccactccttaggtacatgaagttggtagatgtgtagtttgatgttaaattattgggtggatgcatgcaccgctggttgtagagactggtaaagcccactagcaggaccccacctggaccaaagcaatccctcaacccgctggaccatgaccgagaacaaacacaaaggacctgaaatgcgttgtgaaggccagaagccgacatccacattctccacccacggagagccccagagtccctcatgcacatcctgcttgatctattacacacattcacacattcgcaacacatttgtttggttttcaagcttacaacatattagaaacagaaaggaagaaaggctgtcagcagcagaaatacctttgagcaagagggacggtctttgagaagcagacttgagaactcaccgtgtgctcttcatgcgccagacactgcggcagccacagcgtcccacatgggatgccacacgtgatgatgttatgttcatggtgatgacctcaggcgtgaagaagaggttcagccgtttcacacagtctgtttaacaagcacatacataacacagacatacgtgaggaatctcagaaaccaaataattcaaacaaagagtctgggattctttcaaaagcgttgcctctgcccaagctttcttcaaattctgtctatagggaaacgtagctgtcaatgtctcattcccgaagacttccagatgcctggatctttagagttctccacctcaccccgagttgattacacaaatgttcctggggctttgcttagtgccctgctctgtgccaggccccacaggcagagatggcagggacccaggcctgacgttggagagctcctgacccactgccggaaacacacgcaccatcacaccatgagggagctcccccatgcagatctcatctgtgtcagagtgaagccagaggatggacggtggagagtctagaaggagaagagaaaggaggatgagttctcaaacatgagcaagcaggagaggccatttaaaatgcacactctggcctggtgcagtggctcatgcctgtaatcctagtggaggccgagacaggaggatcacctgaggtcaggagtttgagaccagcctggccaacatggtgaaaccctgtctctactaaaagaaaaccaaaaattagctgggcgtggtggtgcatgcctgtaatcccagctcctccggaggctgaggcaggagaattgcttgaacccgggaggtggaggttgcagtgagcagacatcgcaccactgcactccagcctgggtaaaagagtgagactctgtgtcaaaaaaaaaaaaaaaaccaacctaaaaaataaaaataaaaataaaatgcagactcctgggctggattccaggtccactgcatcagaacctgcaggagaaggaccaggaatttgtgatacgaacatccccaggcaattcttgaccctccttttgagacctacactgtagaagatgggcagagggagaggcagcaggagcccaacctgggaaggagccatcgggaaaggtgggaggaggggcaggagacagcgcacgcgaggcagcaaatccttcagcccttactccccaagagctcacagctgcctccacagagggtaacggtatcattatccccttttcgcagataaggaaactgaggcagagaggccctgcctaaggtcccccagctggtgggaggcagagacaggaaccagccctcatggtctcactgtgagactggacttttcacagctgtgcggtcgagtctgagccaagtaaagtaaagcgagtttttgtacttcgaagtctgggacataaaatcttcaagacgtcagcatcagtgacacgatggtgacagaggccagcattgcttgttgtatctttttccatcctgttcctatctacacttccattcttctgttcattctgcttgcatttcccacccagatggctttcacggacacacacacacacacacacaccgcacacacacacatcactcacagacgcaccctgtgcccaatgtcaaaagacaaaactgcaacacgtttagtcatagacctcattgtcttttattcttgattcatgaatggggcagcctcccttctataaaacagagcaagagctcccaccggacaattgcagaacagtgggctttgtaaggtggggacaaggaaacagaacaatagaaaagaagctgatgggttaacatcaggttacttcaggacctcctaatcacgctgactcaggtagaccagaagctcctgttttcaggaaaaactaatctgtttggggacctacctgcttccttattaaagttttgggttgattatatggctcttagcatgactgactccattttggtttggtttgatctggtctgttggggcctagtgcaggatctcagtccaaaacaatagcctcccataatttttgtttaatgctgggtcagcggtaggcttggtccacttgcgcttctgcctgggtgggccttcctcttttcctccttttctctctgtggtgaaatccccattcttctttctgtcctccacttcagtttcacctcttcctgcaaccctgcccacagctcttcagcgccaggccctggactcagctctcactacgcaaacctccaacatctcactgagtgggaggtggcccccacctccacaccagacctggaccttgagggtccaggcttgttttccttggtactcctggccctgacgcacccagccaggcacacagaaggtgctccagtatttgatgagtgaatgactggtagcaccagaggaaagggagcagggagtatggccaagaccattagctgccttcctcagtgttccttctccccttctccctagtaatagaaccctgacttttacctggccgtatggtcactcaaaataaaggactacatttcccaccttctctcgcaaccaagcctggccaatcaggtttaagtggaagtgtagtgtgggacttcctggaaggatctttaaaagggacaggatgggcccctcttcctccctttctcctttttggctgcctggaatactaatgcaatcgcttgttccgcagccactttggactaagaggtgagtttgagacctgaaccaaatctaggacaatggagtaaaaagataggatcttgggctctcagtgaccatggatccatcatttcacccctgaactgacaccttgacacttcttatttttggtggtggtggtggggtagcttctattttgttggcatctctgtggtctattcatagttcacctgttttagctgacacatggagccagttagagatgggcgcaagggcttcctgatatgaagacttggattctggtcctgaccctcctgttactactgttacgtacgtggctaggtgagtcggtcaccaccctagcctggcctttgtaaaatgagctcaatgatcactgccctccctactgtacagtgtttgtctgaactgaatgaggtcaagcatgtaaagatggtttgcatgtggcaggacaatcacaaatggaaggagtgtatactacctcggtgggcaactcagccaccagttggccaggcaggggctccatccaacccaattggattgagccaatggccaacgaaccccatttgctaatttacctcttaggtccttgtaggggcagcaccatttcctaatgcacccccaccttgaaagccaccttgatccgtgggagggagaggggctgtgggtattagtgatggggaaggccagagaggctgggatgttccatcagccaaccactcagaaggagaatagtgccaccaacatcaggagctcacttctagtggacatgtctagagatatgtggctcagccctgcgttgctgcgtgtggtcacccgctcttaactaaatacagtgctctaaatatggctgctcccaaagagactgtgggctgtcctcaccagccatcctgtcccacccccaccagaagaaacctcttcttattattaattccctaaccgattgcagatattgcagatggtcttaaaggaaatgccagagaacaaagtttcctctgatcaaagtatcttaagatgtgtccaccctcattagatgccagcgataaaaaggaacaaaaatttttctcaaagagtgaaaaggaaatgagatcagtgatggcaggtctaattgtggacatgtttgcttcgaccttaccatggaccactcactcagtgggtgccagacacaatgcagtggcttggcgcaggttatgtgattttttttttttttttgagatggagtcttgccctgtcacccagtctggagtgcagtggcatgatctcggctcactgcaacctccgcctcccaggttcaagcgattcttctgcctcagcctcctgagtagctgggattacaggcatgtgccaccatgccaggctaatttttgtatttttagtagagatgggtttttgccatgttggccaggctggtctcgaactcccaacctcaaatgatccgcccaccttggcctcctaaagtgttgggattacaggcatgagccactgctcctggccaggttatgtgattttaaagtcccactgtattttattaaggagttgattgagcctcaaggaagtaaagcaacttatccagaacatatagctacgaagctagaaactcaagattccaactaggtccatccaattccaaaagcccggtgaactttctgttactttctatgggaagttttcaggtttagtataaagcaacatttcttaattatgaatacaatcttatgtaaccaaattgcacattaaagggtattccttttgatccttctttcctcttttctaataatttttacaaggcctcaaaggaatagaactctaaatctgttttattaaattgctttagttttcaaacaaaaatagctcctgttggtttatctttagctgataacctaaaaacattccttttttatcgctgtaaaataatgtgtctttaaaggatattctgtctcctctttaattttatgttgaaataaaattttttggtgtccaggggagttggccattttagcggctggtgtctcatctgaggtcagaggtgagtcttgcgacatagaaatgatgggggtgaaaaaggaaaagctcagcttcaataactaagctaagcacggtggtgaggagcatgggcttcagaatctcttggccccagtgccttgccagtgcctcagtttcctcatctgtaaaacaactgacaggattaagagaattaaattataatagctatgcgttagtggcatcatgaagaatggctctaagcatgaattctgggttgaatctctctgggcctcagttttccacatttatttatttatttatttatttatttatttattttgagagggagtcttgctctgtcacccaggctggagtgcagtggcacaatctcggctcactgcaacctccacctccaggattccagtgattctgctgcctcagccccctgagtagctgagattacaagtgcccgccatcacacctgtctaattttcgtattttagtagagatggggtttcaccatgttggttgggctggtctcgaaccccttacctcaaatgatccgcccacctcggccccccaaagttctgggattacaggagtgagccacggtgcccagcacgtgtagctgttggtgcctattattccagaaccgcagaggcatggaataaacgggatgtagggcaaaacccactcatctcccaaaactcaggccacccacacgtgggcctgcacaatgacagcacactgaagtgaccaaggaagtttgagtaccatggtttgctctcaaggaacttaaatcctaaaacgtacatgaaatcctgagggaaaaagacctcacaaatatactacacaataggagttatttcaccaggttaattgccaatgagaaatgcaatgtttctattggcagagcaagacttcctttagcacctgtggctggctgaatagtggccaccaaagatatcaaggtcctattccctggaacctatgaatgtcgctttagatggaaaaagttctgcctatgtgaccaagttaaggattttgagatgtgaagatggttttagattactcaggtgggccctgaatgcaatctcaggtgtccttgtaagagggaggcagagggagatttgacacaggatgagaaagtggtgtggccacaagcccaggaatgccggtggccaccagaagctggaagaggcaagaaacaggtcctccctggagcctctggagagagtgctgccctgccaacagcttgcctttggctgtcttctctgtcctgtcctgtcctatcctttttcttttctttctctctctttttttttgtttttttggagatggagtcttgctctgttgcccgggcaggaatgtgatggtgtgatctcggttcactacaacctctgcctcccaggttcaagtgattctccttcctcagccacccaagaggtggaattacaggcgcccaccaccatgcccagcaaatttttgtatttttagtagagatggagtttcaccatgttggccaggctggtctccaactcctgacctcaagtgctcctccgacctcaggctcccaaagtgctgggattacaggcatgagccactgagccaccgtgcctggcctctttcccttcccgtcccccttcctctttcccttccctttccctcccctgcccccttccccccgccccctccctctcccctgccccctccccctccctctcccctctcctccctcccctctttccttcctccctcccttccctccctcccttccttccttctctctttctttcttctttctttctctctctctctcccctccctctcctccttagcccccctcctttctcccttctctctctttctttttgagacagggtctcactctatcacccaggctggcatgcagtggtgcgatcagagctcactgtagcctcaagctcctaggctcaagcggtcctcctgcctcagcctcccgagtagctgcaaccacagccactacatctggcttaatttctgttgttttaagccaccaagcctgtggtaatttgtttcaacagccacaacaaattaatatagcactgttgactgtcaagtgaggcctgcaacagtggaaactttatagttctgagtggtcagctgtttgaggtgtgattaatctccaggaaaaatgttaccaggattccctttgtaaccatgacaaaatgctgagaagtggtggacacttagttgctgaaaagcactgaacgttcgctttcatctgacaaagtctttctgaataatacagggaggttcgggagggaaagaaggcaagcaaacgatgggatgctttctgcacgtggctgtcaggaaattctgggtagaaattctttctttctccttttcttttctttttgagacagagtctgactctgttacccaggttggagcgcagtgatacaatctctgctcaatacaacctccgcctcccagggctcaagtgattctcccacctcagcctccctagcagctgggaacataggtgtgcgccaccatgcccagcgaattttggtattttttgtagagacgaggtttcaccatgttgctggcctcgaacttctgagctcaagcaatcctttcaccttggccttccaaattgctcgtacaggcataagccactgtgcccagtccagaaatgttcataaattgttttttttcatagaccttattttttagagccattttttagattcatgcagaattgagtgaattgagtgggtgccccaccacccaccaccgctaccaacatcccatgtaagtgtacaaaattttttttttcttttacaggcagggtttcactttgtcacccaggctggagtgtagtggacaaccatagctcactgtagtctcaaacttctggctcaagtgatcctcctccctcagcctcccaagtagctaggactatagatgtatgccactcagcccagctatttttaaatatttttgtagagatgaggtcttgctgtgtttcccaggctggtcttgaactcgtgacctcaagcagtcctcctgcctcggcctcccaaagtgctgggattacaggtgtgagccattgtgcccagccataaattattctttttgcactcctcggaatgattacctctgaaatgactgtctgaatgtacataaccaacagtgaattttatgatatgtttaataggggtagtctttttctataaaaatgaaaaagacaaccacagattcttacaacagacatcggcagcagccccaaacctaaatagggaggtgttgtcccagctgcaagtggctcagctacagggtctcgagatgaaactccacggcacagtctaatgacctgctggaattcctggagttggcggggagattggctggataagtggtctctgcagacccccatgcgtgccacccctttgcccaccatagcccacttgaacccaccactgtcataactttccaggtcctaactgggaccacctactccccttggagggtccggatggagtttcccctctgcggctgcctctcactcatcctccaccactttgccgacaaggaaggaaggacaatcgggaggagggagtcttgcttggcgaccatctggacaatatctcgcccatggcaagctggatccctgtggattactttggtgggtggaaacttggcacactatttaatttgggctttttgggggatgactgcacactggttctctttttttctcagacctaaatttcgaccactcaactttcagcctgctcacccctgcttattgccatccacctttgggctgggttagacctaatcctccccttgacaaagccctcaaagtagccttcacaagataagagtcgagacccctaacttaccaacaaattttaatgaaacttctagtaaactcaaagcgctttgccaacatccttaggagcaacccagttctcgcagcaccccatgtgaggtcgctgttgaagtatctttggctgcagtggtgtggaattcatctcaacagagttgacggtaaagaccagacatgtagcagcctcactgcttgttggaggaaccacccttaagaaaatttcccaagatagtagttttcccatctccgtactttgctagttaatgttctccacttgcttgcgtttatcctttcaattcctttgctaattaaattgctgaaaagtatacattggtaagaatagccactgtcaatggactgcaaacaaaactcgtttctgttattgatgataaaccatttcagagaagaccaggctgagtctaaagggttcagataattacaaggggaaggcagagagagtagttcatggccacaggacttggccacctctgggcaacacataatgcttgctaagctaatgactgtagggatatagaactggccctcagcctctctgtcttcctttggcctctgctcttcctgctgccttctctctttgaccacgatgacacactttccataggccttcctcaccacatcacagaactcagagaagaggctgtcttcttgtttgatacacagctcgtctcttaggaacacccgatatttccaaggcacccatccttgactacccgcagcatgcacaatacaccaagttggggtttgtatgaaatatccatcactaatatcttccccagttacgagactttctgggatattggtttccccaaaatatacggtcttaaatccatcatattgcagtgttctcagggttttcagatattggaggcattgcttcctcttgatgccatcaaattgacttctgataatgacatttcttaaaagagggcttgcaaagcgaggcatggtggcttctcaagtgtttttaaaagcttgcacatctgcatctggggagagatggcaagtgggggatgatgacctcataaagggctttcttacagtggtgccagtcccacacatacacttcagatttcaagcatcatggaataaatactcagaacaactccctgctgacccataaaatatgggaattgcagatgctacccataaaaatgctactttgacatcacttctgcaataggtctgagacagaggttggcaatcttttaatagtaatgagcctacccatttggcttaagatggggagaaatgtttacattcattcatccatttcaaaaatatgtactgatcacctgctgtacaccaggcattgtgccaggcaccaggggtatagtcatgacacacccagggagtcctggacttacgtgttgtgtgtctgtgtatgcatagaatttgtgccagttgccttcccatttgcacaactaagagtgattttttccaggtggcagaaggaaggtatggcaaattgcaaaagaaagtcagtctgcacacctagcttccactggcgcttgcaggtctttttttttttttttttttttttttttttctgagagggagtctctctctgttgcccaggctggagtgcagtggcacgatctcggctcactgcaacttccgcctcccgggttcaagtgattctcctgcctcagcctcccgagtagctgggactacaggcaccttccaccatggccggctaattatttgtatttttagtagagatggggtttcaccgtgttagtcaggatggtctcgatctcctgaccttgtgatccgcccgcctcggcctcccaaagtgctgggattacagatgtgagccactgcgcccacccggagcttgcagttattgaactaattcaatacctcatcttgaaagcacttttaattttatatactcaggcaaaatgacagtttgcttcaaactctaaccatctcttcctttgtattttcttgcctctttaatcagagctaaagacatttcataaaatgggcatgaaggattccttcaaatgaagacgtggacaaaatgattggtcaggtcctttgctctactgttgaatggaggaggattttttttttttttccctcacacaggggttttcttggagctcaagtttggatgaccccagacagtaagataatctcatcatggtaaagttaatatgaaatatgtggtctccaaacagcctctcccagaggccaggatcagcaggtttgagtggataattggcttgtggtcattttctcataggatttttcttttagtagtggaaactgtttttcaaatcaaatttggatgccaactatgtggaacagaagtgtggctgctctggtggaagtggcaatggtagtcctagagtctccctgtcagccacaccctttgtctccccctacccaagggaccctgtggcctggaaccgcagtgtgaaatgctatatagtgcaatgaagtcaattcgaagacaagagttctttgcctttctcatctaatttttagttatggatatgagacgcttgttcagaagtatggaaaagtatatataatatgttatcttttagatgtgggtgtaaatatgcttatgtatgcaatatgcttatattttaacgcataaacaacatgaataaagcaaacactctagacttctccaaatgtatcttgttttacagttttcattttggaaaatgtcaacatttttacattaaaaaatattactcagccataaaaaagaatgaaatcacgtctcttgcagcaacatggacagaactggaggccattattctaagtgaaataattcagaaacagaaagtcagatgccacatgttctcacctttaagtgggagctaaataatgtgtacacatgggtacagaatgtaaaataatggacttcgaaagggaggctgagatgggaggaccatttgaggccaggagtttgagacaagcctggccaacatggtgaaactgcttctctactaaaatgcaaacaaattagccagacatggtggctgacacctgtaatctcagcactttgggaggccaaagtgggtggatcacttgaggtcaggagttcaagaccagcctggccaacatagtgaaaccccatctcaactgaaaatacaaaaaaattaactgggcatagtggtgcgtgcctgtaatcccagctacttgggaggctgaggcacgagaatcatgagccgagattgcaccactgcactccagcctggacaacagagcaagactccgtctaaaaaaagaaaaaaaaagaggataggattagggtgagggatgagaaattatttaatgagtacgatgtacactactacactcaaagcccagacatcaccactgagcaatcaatccatttgacaaaactgcacacctgcacttgtaccccttaaatttatatacaaacaaaaacaaaggcaaatcaaaaataaaaataaaacaaaatgatctctaaacaatacaaacagtaactgatgaacctagctgcttatcatgtcagttccaaaatcacacagagttgaatttctttcaaatgaccctacaacacagtattttgatcatatattctccagtagagtataagctaaggacaaagaaaaacacatgaaatcttaaatggtactcggtagttttattgttaataatgatgctggtattattattttgaaactcatgtccatttctcagctgccatttgatattaattttttttttttttgaggtggaatttcactatcactcaggctggagtgcagtggtgtgttctcagctcactgcaacctccacctcctgggttcaagcgattcttctgctttagactcccaagtagctgggactacaggcacgtgccaccacacctggctaatttttgtatttttagaagagacagggtttcgccatgttggccaggctggtctcgagctcctgacttcaggtgatctgcctgcctcagccttccaaagtgctgggattacaggcgcgagccactgcgcccagccagtgatttttaacctttatcaatctgatagacaaaaagatcatttcattgttttaacttctttaattatgagtaaatctggcaatatattatgaaaacaatgacaagaagaacttgatataaaatgcacaattcagacgtccttgaagatcattttagaggcagcatgaagtggggggtggcactggtgatgggggctgggtgtggagaaaaccagccaaaggaggactcatgggatcctggagcttttgactggggttcacttggagcccatactcaggctggttctgacagcagcacctgccaggcctcagcttaggggcacaatgtgggacacatggactgggggtgtggtcccagagcctaagaggcaccaacagagaggtctccgcagagactcatctgtgccccccacccaccaccccgggacaggccaagccagcgtctggccaggaactgcttttgcacaaggagccagaagtagtttgccccgataaatgggggcctggactcacgcaaaccattgcaccatggatggccagagaaactcagagaaccttcctgtgcttgttaacatactctctcacgtcctctgcagcctctgccaagccaagcagccagctcctaggactcccctccctccacctgaggctccttgtcctcccttcctcaggagtctccagcctcccgggacttcccctccccgctgcccactccagcagaggctgccaactgcctgggagagagaagtgggcttcctggggccacctccccaactttggagtgtttggaaggtgatggagcgaccactaggaggcagtgtggacaggtctctgtaggactgctcaggcagacacctttgcagggacctcccaggtcgggagccctccacacttttcccatgggagcttctccctccaccccgagtcactactatctgctttcctagaaggcacttctttacttctaattcttctccactgcccaggtaactgatattctcaagtgggacattgtaatttgtttaattcatttaaattgatttcatataattgggagataaagattgttcagttgcaagacaaagtcttaacttgaactctcaggacacgggtgggtccctaaactcaatacgtgagtgttgctgccgggctgttgggccatcttccacccgccatagatcactttcttcatcaaagaagaaggaatatttagaaactggtagtacaaaaaaacaaacaaacaacaacaacaacaacaaaaaaccaaaacaacaaaaaacaccaaatcaccaaaaacaaacaaacaaaaaacaaataaaaacccaaagcagttgctcctataaatagatgtgtgtatacatgtggctggtatgaatcttatccacaaattcagttttgtgggaaacatcacatttatttatttaaatcaagtcatatgggacttgggcatggttggaggttcttaccccaccccacttcccaaggccagtgcacaggcagggccttgaggtcacccttagccgatgcttgggtctaggtgctcagacccaagcccctgtggtcccatcatgtgggcactggcatctttgctgaggctgagaatttcaaagccaggatccagcccatttaggtaaacccaaagtcactctcccaggtggcccagtcatcttcttgagaacaagagccatgagcctcagttccctgcctcaagagcctctgttcaaccctaggcttgtagacaactctgccccttcttctctcccttcagtgtcacggtcccctgtcccatccctctctgggacaggtaccacaacctccccaccatacacagggaaagggtcagccctcaggtttttggcctggcatcttgaatctcctcccaggcaacaaaccacagagggcctggcattctcctgtgaaaagcagggcggaaaggaaacacagagaacaaacccacagacaacaaacccacagaaaacaaacccacagaaaacaaacccgcagagaacaaacccacagacaacaaacccacatcaacaaacccacaacaacaaatctacaacaacaaacccacagagagcaagcccacagggaaccagccaaattatgtctgctgtgcatctcggcagacgatgctgccaccgtctgtgtatgagcatgtgtgtgtcagactttcccatcgtctccaaacttgttttcagaataatgcttccagtgaaatgagtcggccacatgaggtcacaaagcccctactctgttcagcacctggggtaagtaataatattttggagcacttagtgtggggagtagccctgacccctttacatgtcatgtcttagttcattcttgttgccatccttggaattgaggccaacatcatctgcccatttgccagacaagctgctcaggaggagagggccacagccccttatctcctcgccaaacaagagaagatccccagttgctttttttttctgtggaagagattcttttaaaaacatttttttcatggagaagaaaatctgaaaaaaaagaatgaaaccgaaccaatagtcccatagacagttagttgttgttgttgttgttttgtttgtttgtttgtttttgatgaatacagaaattgacccttctggtcttaaagcttgaaaattaaatttgttttatctgagttgcttcctcaggaaaggagcccaagtcctctccaaaagtatcagagaactgaaactcaccagatcatcttgtctagacaatgagacgtcaggccctccattcatcatgactgcttccttacccctcccgagttcctgttacatttcttccctgctatataaacccctaattttagtgggtccagaagatggatttgagactgagctccatctcctgggcagcagcacccaattaaagccttcttccctggcaatactgattgtctcaatgattgccttccttccttcctttctttttgagatagagtctcactctgtcacccaagctggagcacagtcgctctatcttggctcactgcaacctctgcctcccaggttcaagcacttctcctgcctcagcctcctgagtagctgggattataggtacccgctactacagctggctaatttttgtatttttttttttttatagagatggggtttcactatgttggccaggctggtctcaaactcctgacctcaggtgatccacctgcctcggcctcccaaagttctgggatgagaggtgtgagccatcacgcccagctgagtatgtgtgtgtgtgtgtatgcttatggggatgtgcaaatgtgtgtgtgaatgtgtgcacgtgtccttgtgaattgtgaatacccaggacttgagcacactcagttcctgatgcacttcctgttttctcagcagctgagctcaggcctggaactgagtgacagcacacccgggcacctgtctccctgggcacccctcccacgcctgcttcccacggcattcccagctcccaccactgggaaggagctggaatcatgagtcgggataatcaccgaattctcttcgaccttcctcagctcctggtttgttaaggcaaacccccatctctggcttctcctggaacctcacctgggaaagaaagaggcagccccggagctggaagctgcttcagggctcacccggaacagcagactcaacctggacccatccaggcatctcctgggagtttcacccaattgcttctgcctggcaccagctcagaggttctgacagaattggcctggggtgagacctggcatccatgggatttttacaagcttccaggtgattctacagggaagccaaggtgagaacccctgtcctagaaccaggtctgatcaggggccggtggggaactgtgggtggagaacattagtgcttccagagcctcagggttggttttgaaaggaacgtaacacatttttttttctcacaaagacatatagagagagactttttaaaatagacatatatatagagagatgttttaataaagagaggtttgggtttatataagtaaaaaagatgatagaaaatagagaatgagattaggcttccccttgctctcaaaaaatggtttgagagtcttggaactggttccactctatgatagccatgagtactgttcgcccaacttttggttctcagccttccaggccccggtgggatgagacttccctgcccccacggttgagaggagccatgggcttattctagccaatgaatggtggatggacgtgactcgtgtctcttccaggctggagcatttaattgtccaggtgagatactcagggactcgtccctccagagctgagaatggccatgtttccagagggtctgcaggagcaacctgagtctcagagcacagccaccagcagacctgctgcacgcatgtggcgggggaaagaaagaaagccagctgtctgcagccactgagagtttggggtggttgtttctcatgacaaaaccagctcaccctgacttatacaaagtctttgagttatatagatggagaatgaggctcttgggtccctctattctcacaaagcaatagcctagctaaatccatctaactagggagcagaaaaggggatgtgctggcttgcacaccctagacagttgttcaagaagtcaggacaccaggcctggagtgatacttcagccatccttctaggtgagggtcttgaggccacacagacagaagtggcagagatgggacacacattcgtcttctcactcacagtctggcactgagctgtgggctgctgggacaccatgcccccatacgagtagccttcccactccttaccttgaaggaaaagtgttttttggacaaatacctgatggaaacattacatgggccttggaatctgttagatctagcttcctgaaactcttgctagctgtgtgacaatatacaagtttcttaacctctctgagcctcagtgctctaattacactcccctcatagagtttctaagagcatcctggggctggcacgtgtcaacgcacccagtatttgatagagtttgttaaacgttggttatcctctctccctatcgcacctcaaatggtaagggctgcctgccagcttccatatccccagcagtgccctgagttgttcagatgttcatccatctcccacagaactcaggttcctttggaggaagccacatcaagtcctgctccaagcttaagccagtcagcacattccatgctctgccccattgccagggttcaggagtatgctcgtgatctaagcacccccactcccagatacagctcaagattcttgcttggacttctgggcactcaggctcctccgagagggaatcaaacttacttctctccatgtcctttcctctaggagatgcgtctttcataaaactctcatcaacactgttcagacatgtcccaccccagcaggggacagcctgggctcaagctgggatccctactttatttattttctgctaattaaacttcctaatatactccacactaagtgtgcttgcaaggcagggggtgtgggataagcggccctgcctggctgggagagggggcagctccctgctgtactatgtattaataaagagacacatgcatggcagggcttgtctgggccttggtggcagcttaggacagaaggcacgtgacagtcaggggttcaaacaacccagggagaacactgcttcagggaagacagctcagcatcttcctggcaaagataatgacattgataatactctccaaagaatttcaggattttgagcaatcagaaaagcaacacagaaattcatgtcatcaaaacgatatggctctattggacacttaagacatttattggaggctcaacaacataatcctgctggttggttttacttcattgattttccgttgtgtctgattacattgctaatgctgatggtggatgagctacggctcttttcctgcctgtcctgaggtttatccaccaatgtttcagttctgttttaagatattgtcctaagcccccagcatcgcatgcatgctgtttttttgttttgttttgttttgttttttacaaagagttcatagcccgtggaagactctcctccatcacacacttaggttccctccacaccaggcctggaaggagtctagcttctggggactgtacatatgctgtggaccatgcagaacctggagaggcggtgaccccttctagaagtgatctgcctgaatccttccctctggaggaggcatttattaaatgccaggttcctgaaaggctctgagatgggcactccctctcctgagtcgtcccttccattactgctttcctatttctggccagggttccctggcccctcctccctgctcccatgggaccccagttcatccccatctttgctcaattgccctgcactgtagtaatccattggcactcttgtcttctccaggagaaatagttggaggagaagtttatagggtttcctgggccagggctggtctacagtcactggacagcaggaaacgacccttcggggcctaggagggccaaggctggtgggcaggtacagggggagccagcactgctgtccaccactgtgcagcctggaggctgtttcccatgaccctgctgatgggacccaaggcaccccaggccacccactcccctgcccccagcagggtgtcagctccccggcttccctgcatgcctgcctgacatggacagtgcaccttcgggccacacttgccctgctagcgagcctccagtgaactgggaattccacagagtgtagaggactcgccccagcactgtgctgagaggcttcaccaaactgtagcctggcttccacctgcactaagctgcatccccagaggcgaccccagccctggctgagtcttggctcaagactttgcaatgcagccaaatcacaaaatgcacctcgtccagcccaccccgctaaaccattttcagtagttctcccctcaccgttctggaactttccatttccacgtggcccccacgttctgttttcatttctccttcagtccctttttgttccctttctgttctctctttgaagacctcagtcaccgttttctgagttggggttgagcttggtcggtactggaatctctttccgctgctgcaggagtctgaaggaatcagtcttgccgcctgtaacacatgtccagcgctgctttttctctgatgagtgtcttagtcagtttgggctgttaaaacaaatggcttaggcaacacacgtttctgtctcacagttctggaagctggaagtctgagatcaaggtgttggcagattcggtacccggtgaggacctgcttcctggttcgcgggtagaacacttcttgctgtgtcctcacaaggtgcagagagagaggggggtctggtgtctcttcctgtaagggcactgatcccatcatgggggccttacaatcgcgacctcatctaaacctcccgaaacctcatctaaatctcacctccatactatcacattggggattaaggctttaacatgtggatttcaggggacaaaggacaaaagcattcagtccatggcacatgctcagtgcctcgactcttgcaagtgccacaccacagcctctctggggctgtgtcctggaggcgtgtgccatgggccctgtgtgccatgggcaaggcgcacagcatcctcccggccaccccaccagcgagtgagctcctggcaccctggctctctctggtcacccatctaccagtcttggtgctcctgtgcactagaggaccagctgcctggggactgtgggccaactgtggccccggccacccacgaacttcccctccggccagtggctgcaatcacatcttctctaaagacgtctgaagcccagccttggggagccgagttggtccttccctgggtactgagccctagggaacccttgagagttctctttgtatctttgtagtttcttcctcaccacttaatcatttccttacaggaaacttcctgtgttcaagtgactgtatggtttctgcctccagcttcatttgtgggtgccataagagaggcaagcatggagcactaggcgcaggggatgggcaactggcaagcggggagatgcatgcagcgcacttagtgcctggtacataccaagtccttttagtctggatttcattatttttaaatgggtattgctatttttaaaagaatagttacaaatatttattgtgtgttttgaaataagtgggtcaagatcaataagatattgttgatcaattgatcaataagatatcttttattcttaaaaatcatattcttctggttcagtggggaagagactgccgacctgtatttacagcattatgtgataagtgttctccttttcaggtatgtattagtctgttctcatgctgtcaataaagacatacctgagactgggtaatttataaaggaaagatgcttaattgactcacaattcctcatggctgaggaggcctcaggaaacttacaatcatggcagaaaaggaagcaagcatatccttcttcgcatgatggcaggaaggagaaatacagagcaaagtggggaaagccccttataaaaccatcagatcttgtgagaacgcaatcactatcaagagaacagcatggaggtaattacccaccggctccctcccatgacgcatggggattatgggaactatagttcaagatgagatttgagtggggacacaggcaaaccatatcaaggtgactcctgcaagcacctacctccacccctccttcatccttgccctcattctacaatgatttggtgaaatctggtccctgcctcagttttacagcctccccatgactctggttacttcctgattagcttaaacgaaacctaactaggttgccctaggaaagcatttctgttcctgacaccccccatctgcctgctgcttccgttccacctgtatgtgtctgggcacatccctgcatccctttgctggcttctagcctactcacttcaagcatttatcccatgagtttcataaaatcgtagaagaaaagggcttgaggcagtggtggggaaatgataggaaagtcatttctggatgcattctgccatcctgcagatccctaaaccacctctccctctccattccctccctccagagaacagcttctccttgtctcctgtggaatagttccgcccacattcatgggcccttcctgtaccaaaactgtacaggtctctcttgcttaccaaacacttggcaaacaaatgtgccgtccttggaaaaattctgttgaataaaattttctctctttgatccatccaaatgttttacaaagtgctacagaagccatggaggaacaagcaattctgccttagggatcaaggtttcacacagggggtgatatctgagcaacagtgcttttttggtttgtttgttttgttttgagatggagtctcgatctgttgcccaggctggagtgtggtggcacaatctcggctcactgcaacctccgcctcccaggtttaagtgattctcctgcttcagcctcctgagtagttgggattacaggtgcccgccaccatacccagctaatttttgtatttttagtagagacggggtttcaccatgttggccaggctggtctcgaactcctgacctcaagtgatctgcccacctcggcctcccaaagtgctaggattataggcatgagccacagtgcccagccaacagtgcttttaattggcattttcttcaaagactttgatgtcctataggagggggcctatgactcagcctcagccaatcagagcgctccattccctgggtcacctgcacacctgctcttccctgatccactgcagtgccctcaccctgagatctgaaacttgagcagaggcactaaaaggcagacatgggagctgagctgtcttttgggagaatcctagtgagaaggttctccaactggggccgccaagtaagggcctcatggcagactaacccctctccttcctaaggctgggaggagctgctgtccttttgattctgtgagctacctcagttaccttcctcaaaatcacacacacgcgcacacacacacacacacacacacacacacacacacacatttgcatgcgctaggtagagctgttttccataattgccaacagaagactaactgtatttgaagaatgagctggcattcttctgctccggtagaagtcaaggcaatcagttatgagaatcagagcccacctgtgactccagaaagaggtgcataaataccaagaatttagtctctaaagtctttctttaagtccttttttaaaaaatgtgatgagtacatcacccaggaaaatcaaattgtaatgcaaccgagtcgatgcaagttttatttaggagatgggttacaatcacctggggaggctctagttaccttgatttggtctggtacaaaccctagcaccatcatccacagatccccagaggaagtcattcctggatgacttcctcatcgattttaaataatttccatttcagaggaaggcctttatctgacctgatcccctaaatattgggggaaacctacatagggacaaagacagcaggtgtctgcaatgttgagaatcagtgtgttctgtcactgtctctatcagggctggtggcacatgcaaatctctttcccactctccagttgaacactaacgccatggtgcccacaccttccttattagtccatgtacatggggtttgtcaagacagtggttcatggctctgaccctgagcatgtcagatttcaggggctttatgcaaaatatccataccagttggggtcatttcccatcagtattgctcacaatggagcctacaaacccctagttcccatccaacacatctccaaggcagactctcagaccagctcccagaaatgaggtgagtttagatcaggcagcagagaggtggcctaggaaggagtccttggagctcatgcacctgtgtctgggcaccaacaggaagatggtggcttttgctctttgggagatatctttggagccagtctctgaccacatgtccaacaggacaggcatccttggggtttccatggcagtctactgacagtcaggggtgaggattaaatggtacagagtctcactgagtgctctttgagaggtcaagcaatgagaagtcctgcaaatgattattgagctgaagtaagaagtgtaccgaatctgtttttcccctataaatataaaagcctataaatataaaaatcttggtgaaaaaaaatgatcccagcctcccacacagcacatcacacatcttctcttttcaaatttgactccaaggcccacttccttcgggaaatcatttatccagtggtatcatttaggatatttttggttgtgaggaacaaaagcctagctccaaaagacttaataaaaggatctcattggttcacaaactgaaaaactccagtggtaaatgaaggctctgggtacagttggtacaggctctggtctctgtaatttcctagttcttctcccttctagatgctgggtttttgccttcaagttggctttcttcatggtggcaaaatggatccagcaattctgtcagaggttttcgaagcagagtgactccatcttgattaaaggctgtgtaaaatgaggatgagacttgctggactgcattccaggagggtaggcattcttagtcacagggtgagacaggaggccagcaggattgatatcacaagacacaggtcacaaagaccctgctgataaaacaagatgcaataaagaagccagccaaaacccaccaaaaccaagatggtgattaatgtgacctctggtcttcctcactgctcattatatggtaattgtaatgcattagtgtggtaaaagacacttctactaactccatgacagcttacaaatgccatggcaatgtccagaagttaccctatatggtctaaaaggagaacctatatagtctaaaagaactgagggttctgagaaatccctgaccctttcctggaaaatttatgaataatccactccttgtttagcatacaatcaagaaataaccatagtgtactcagtcaagcagtccctgctgctgctctgcctatggagtagccattcttttgttctttactttcttaataaacttgctttcattttactttatggacttgccctcaattctttcttgtgcaagattcaagaaccctcccttggggtctggatcaggatcccattcccgtaacaatttcaggctcagatcggcttttaacaccatccagagcaagagaaagcttttttgttccagaattccccattaaagttctcctggtcactcttattgggttgtttcgcttagggtcaggtgtccatcctggtcccaagcaatgaggccaggagatgggatgcaacgactggatcaatctaggcctcttattcccactttttaaaacacttattattattattttttaaaaattatttttcattcagctttttcatttgaaacttattccaattcttgaactgggggtagtttcaactttcctagagctgtatgggtcctcaaatgaaaattcggggcagctggattagagaagggggaaatgcatgctgcaggggcaaccaacaaggggagattgtgccaattcactcttcctatcctcagattcacctaagttctgaccattcagccccatttgaatgcattctgtattcctatgactgtggattacatttttgtctacctttgtgtcttctgttttgtcctgccctataagcatctcaaacatatgcataaagcctatataaactttataaataaactaacacttctgttttcaacctgtaggatgatgacaatgatgatgacgacaatgatgatggtaatgatgtggaaaatgtgaaaagagaaagaaatacttggaaatatatctcaccctccataaacaaagctcggggtttaattctgacctgtatgagttcatggggtgaactgcagaccgctgtctgtggacaggaaaacgatatttcatctctagccccagggacatctccaaaagctgagctagatgaactttatataaattggtacaaaatataattttctctttgcctgctgaaagccatttctagaaattctgttaatcagaatctccctaagttaatcagtcatctagacagatcttatttcttttttagacaaagaaaagtatataagtaacaggtattggtaaaccacttgagtgaagcatatgatatctaatgtaaggaaatctaaaagtgtccacaggcaaaatctcatggattcaattgatagcacaggtcatcaactgacatgcagacggaattctcttgtggaacaagacaatacagccattgcttagagactaattgtcaaggaattagtcatttcctgtttcagaatagcatcatcaccaccaccattaatgccaacatcaaccaccaccacctacgccaccaccgttagcatcataaccaccaccaataacatcaccaacagcaacactgccatcaacataaaccatcaccaccaccaaaaccattagcatcacctagaaccaccagtcaccaccatcaccacttaccacaacaaggcttatatttacatacttattttacttttcgaaatacattcacatgcatggtttcattagatcttatctacttggtaaggttggcagatctgacatcattagcctcattttatctgtatggaaactaagttctagagaagcgaagtgatgtgtgaaaggacaccagagtgattgataatcaaatccagactagagtttggttcttctgactccaaaattaatacatttttcttaaaagaaaaaaattttttttgagacagggtctcactctgtcacccaagcttgagtgcagtggcatgatcacagcttactgcagcctcgacttcccaagctcaagcaatcctcccacctcagcctctcaagtacctgggaccataggcacatgcctggctaatgtgttttaaacattttttggctgggcacggtggctcatgcttgtaatcccagcactttggtaggccaaggcaggcggaccacaaggtcaggatatcgagaccagactggccaaaatggtgaaacctcatctctactaaaaatacaaaaaaattagccaggcgtggtggcacatgcctgtagtcccagctactcaggaggctgaggtaggagaattgcttgaacccaggaggcagaggttgcagtgagctgagattgtgacattgcactccagcctgggcgacaagagcaaactccgtctcaaaacaaaacaaaacaaaacaaaacaaaacaaaacaaaacaaaacaaaacttttttttttttttttttgtagaaacggggtctccctaggttgcccaggctggactcaatcttctgggctcaagtgatcctactgcctcagggtctctaaatgctgggattcaggcatgagccaccacacccagctccaatgctttttttgtcgtacctaattctttcaatgaaaatgaagaatttccaacttctgatattaacaactttggtcctatattcaagctagagtctttcaaataaaatagacttttaaaaccatctgtctccaaaccctaaatgtctcaggtgagcaactaagctgctcagtttatgtgactccccagaagttgaattttaacccagaactgactccaagttcattcttctttccacgacaaggagtcacctccttgtatgcccccaggagtctcccggattcctccgagaacagtggaatagtgctcctccccagagcacaggttttgccagtgaagattgaatttggctagaaaccgctgccctgctctctcttctcgaagcacctggaagtctgagaaggaactgggtggctggctctggtcacaaactagcagccagaagcaccccttgtcagtgatgcacccccagtccccctcaagggctccaagtaaacccaaagctgctcccctccaagaagtctggggccaccctagggaaggcctcctggccttgactctcagggggtctctggggttgcggtttggggcccgctgcttccgccctttgcccccaggtgggcctggcagggctgcagcacagctctgttgctgatagacagggtggagcacttggcgaccttgccctgcagccctgtcattttgagttcagaggtcagatttgagtaataaacatcttctaaggacttgtcattctttctgaggatgttgctggccagccggaagacgaaaatcaccgcgtagatgccgatgatggtgagtatataccaggcagcgctggttccgtctggcaccttcagagccctggtggagttggtgtcattcctcccctctgtgtggtcacccagcaggagccccaggagggtgctggcctgggtctggttggaggcttcatggggagtccacttggcccctgagaaacagagaggtccggatgagatccagcgtcctgggctgagggctgcctggccacaccaaggagaatggagccctcatatccgtgaaaacgtgtcgctgctcaaagaggccttctctgaggcatgagcaggagtgtaacaacaggtatgtcaatatatttttaaaaatcaaaagagtccaaaacactattttgttgttgttttgttttgttttttgttttgtttgttttagagagacagagtctctgtcacccaggctggagtgcagtggcatgatcataacttactacagcctcaacctcctgggctcaattgatcctcctgcctcagcctcacaaatagacatgcagcaccatgccgggctaatttttttcttttttctctctctttttttttttgtagagatagggtcttgccatgttgaccaggctggttttgaattcctggtctcaagagctcctctcaccttagcctcccaagccctgggattacaggcaggagccactgtgcccagaaaaacactaagttcttgaataggagacacaacatcataaagatgtcagttatccctcaaataatttatacaacaaacataattgcaataaaaacagcaataggatttctttgtgaaatcaataaactattcatttagaaaaatcaactgttggccgggcatggtgtctcatgcctgtaatcccagcactttgggaggctaaggtgggaagattgcttgagcccaggaggttgagaccagcctggccaacatgacaagaccctgtctctacaagaaataaaaaaactagccaggtgtggtgtgcaagcctatggtcctaactactcaggaggctgaggccggaggatcacttgagcccaggaggttgaggctgcagtgagctgtgttcacaccactgcattccagcatgggaccctatttaaaaaaaacaaaaaaagaaagaaagaaaaagaaaaagaaaaatcaactgtcaagactaattagaaaaaaaaatctgaataaaaagaatgactaatgaattagcctagccacaaattttaaatcagccagctataaaaactaatttacatttttttcaatgaatgaaagctttatatgcacaaagcccagctgggacttgctgggctttgcagagtgtgtgggctgggggttcttcagaaccaggtacaactctccctataaaactacaacagtgctgggcatggtggctcacacctgtaatcccagcactttgggaggctgaggcaggtggatcacctgaggtcaggagttcgagaccagccctgccaaaatggagaaaccccgtctttactaaaaatacaaaaattaaccaggcgtggtggcacacacctgtagttccagctactagggaggctgaggcaggagaatcgcttgagtccaggaggtggaggttgcagtgagccaagtgatgcctgtagttccagcaagacagagcaagactctatcttaaaaagtaaaaaaataaaaaataaaactacaacagctaaaatagtgtgatgcctgtagttccagctactagggaggccgaggcaggagaatcgcttgagtccaggaggtggaggttgcagtgagccaagatcgggccactgcactccagcctgggtgacagagcaagactctgtcttaaaaaataaaaaaaataaaaaataaaactacaacagctaaaatagtgtggtgctgaaaacacaggcaagcagaccaatgaaacagagtaaaaacagcatcaatagttagcaattagaatttgatagctagctaataaaggagcatttctgatcggtgggaaaagatgaattattcaatatgtagcattgggggaaatagcattagatccacatctctccaccatatgaccagataaatcggtccagattaaaaaaaaaacagcccagataaatcaaatattttaacataaaaagtgaaataatttatagtactagagtacagcatggcagattttttctttatcatctcagagtggaatattcttttaagcataacaaaaattcagaagaaacaagaaatagaaatcaaattcaactacataaaaaaaattaagctatttcataccataaaaccaacaggcagatgacaaagtgcaatttatatcactgattttctaaatagccttcggttctgtaagaaaaagtttaaaactgcagtagaaaaatgtgcaaaagatatggacaaatagttcacagggaaaaaatgaacattcaacataagaagagcttctcaatatcactcatataagaaaaatgcaaattaagataataactagataccattttgttacctattggacttgcaaattcatgatgtttcagaataaactaacaaaaaaatggcttttttttgttcttttgtccagcttagaagaaaggtgtctaaattgggagcaaaggtggcaatgacgtggacttgacaccaaaaaaaaatttttttaaagaaaagaaacaagtgcctctgcatttcaggggtttaggattggcatttttaaaatgtcaacaaataaatgttcatatccacacttgacattttttccaaggagaattttaattgtataattgctggtaaattcatgcagccaacatggagggcacacggacaagatctatgagcattacaagtgcacttacctttgacccagcaattctatctctaggaatctatcctaaagatgctccagaacatctagagacaacatatgctgaaggttagtcattgcagtcctccttgtgatgacgaatgcctgggaacagcctgaatagcaccaactgagggatggtgaaatacattttggaacctccatgcagtggagtactacacagtcataaaaagcaatgagttttttatggtactgaatgttaataagtgaaaaaataagctaatggtgacatgctctgcaatgccacttgtaaagaagggggaagttatatgttatttgcttgtactttttttatgtatagaacatctctggaagaatgaataagaaattagtatctgcaattgcctctggggaagaaacctgggggaagaagatatattttttactgtttgcccttttgtacacttagtaccgtgtatacttatttttgaaaagcaagagtgtaccagttggtacttttctggtctccctggtgaggtgcccctgggtaaagccgttgtatgcccttgtaagaccagaagattaagatctcaattgctgttcaattcaaaactgttttctctgcttggagagctggtggagaaaatgaaacaatgaaaaccagagctgtagagtgcaatcctgtgagacatttcccagtggggccttactggctcaaacccccatttcttgctctaatgtgaacacagatgtatttaaaaacacatcataggatcaatcttgcagcctgctgtgcagaacaaaggtgctccaaaatgcttcccatttgatcgttgtttgttgctaattcattttgcgaacgcaagactcagagaggccagtattttttattatagttagttgccagaatgtgtgaatgagcttattacttttagatgaaggaagaaactatttaaaaattacttttcaaactacatgtgacaaagcccaggacaaatgaacagatttaattacataaaattagtcactcgcaagaaacaacaccacaagcataaatttacaccattgtttggtagaatggtttgagacattaaagtaaggaaggtgaaaaattcccgtaattattgcaacaaacaaacagacagcaaatcaacccaacaagaacacaatatccttatattagggcaagagaacttattgaaactcagaacacatgtataaactcatagaactttctagaaattgtcatagaatgatgcaacacattcaaatacaaataaaatatccccaactaagagctacacacagaacattaaattatttaaaaaccagtccattttctacacgaaagaaactcactatattaattactgcaatacattacattttacctttcttacaaaggtaaaagtaagttaggttgtatcttaatggacaaacatatcctgtagaagagagaaactttttcctctgtgctattttgtacttgtaatttaatgacgtgaaatatgtaaaatctcaacctgcccatccttgcattgtagctgagtactcacattccatggggtggtcttgtccttgactcttggaggggcaagttcaagcggctaccatgcacagaaggggaagatgatgaaaggagaactccgtctcctagggaagaatcagtcctactgcagttgagctgcactgagtttccagagtggggagtaatatgatcttccaacaatcttagggcagcaccaaacagaaacttagtaagtggatgactttgctttcatgcaattaatcagaggatccgatttgctgtgtcttctgttgcatcagaacagaaagcacttcccagctttgacttgttaagaagttctcaatcaaaacaaatttttaaaacgtgctggtattaaggaatctccatctctcaggtcccatcatgaactgaggtggccagaagctccccctgaggctggctctccgcttagagcttggatggctattgaattcccctgtgttctgcacctgttgcaggtgtggcagatggccaggtgtggcagagatctgtcatcatagggccaggaaactccatggtcaagagtcaccagcttcctctggacagtctcccagatgaggaaacccagacaggaagggagtgacaccccaagggtgacacacctgaggggacttgggctttccctgaggggtcagtgggcagtggactcctgtgccaggtggtgagaaatggctcttctctttcccagagtcacagaccccattggagttgaggtaggcttaattggaaagtgttagagtaagtgtctgcgggtaaagtttccccaggagcagggagggaaaagttggaagactggcaagttaaatcatccagccattgtttccagttccatttcttcctaatcctcactctaggactctaacttgccacgtttgtgatggttgctggtttttaagatacaatttgatgaaatttccatcaatggggtactgggtaagtaagttataaaataagccatatgatccagcaattctactcctgggtatcttcccaggagaaataaaaatgtaagtttacacaaaaacttgaacacacatgttcaaagcagcattatctgtaatagcaaaaaatggaaacaacccaaatatccaacaactgactaatgaataaataaaatgtggtttatccatacaatggaatgttattcagcaataaacaggaatgaagtactgatatatgccataacacggatgaaacttgcaaacattgtgctaaataaaagaagtcagtcacaaaggactacatattgtaggatttcatttatatgaaatgccaagaataggcaaatctacaaagatagaaaatagattagtggttcactagcgggagggattgggggtgataactaagggtatatagcatttttggaggggtaataaaacttctaaaattgtggtgctcactgtacacaatctgtgaatatacaaaaaaattgaatgcatactttaaatggatgaattttatggtatatgaattatatttcaataaaactgttaaaaattataatatacaagctgggtgcagtggctcacacctgtaatcccagcactttgggaggccgaggtgggtggatcccctgaggttgggagttcgagaccagcctgaccaacatggagaaaccctgtctctactaaaagtacaaaaaattagccgggcatagtggagcatgcctgtaatcccagttacttgggaggctgaggcaggagaattgcttgaacccaggaggcggaggttgcagtgagcagaggttgtgccattgcactccagcctgggcaataagagtgaaactccatctcaaaaaaaaaattataatatacatatacaatggagtattacacagctgtgaaaaagaacgaggaagctatttatgtactgatgtataaagctctctaaggtgtgctgttatgaaaaaggtaaagaagagagcatgttaacatgtatccaaaaattgagaggaagcatatatatatatatctgattttgccactgtaagcatttaaaacaccagtggaatatccaagaaattaagaagaggggttacctattggaggagagaaccaggtagatatatggcaggtgtgggagggagagctctcactaaatatttttatgctttaaatatttttaaccgtatgtgtattacctattcaataataaatgcacccatttgttagatatctttgttgaagattcatttggctcctgctgtctcttgctatgggatggaccatggcatcccccctctgccacacagacaagggatttggacactgccagtgggacgtgggaggggagagcacctgacccgtgataataaggggctcgtggcagtgataagggctgggagtcagggctctggccccagccacatccttgctgcatgaccctgggccagccccctcatctttgtgagcctcagtttcctcatctgtgaggtgaaggtggtgaaggaggtgaaggatgagcaggatcttatgtccttggtcctgagaaggcaggagagaagcctggggctctgtgtgggaagagccgctctctggggaggtatctgaatagatgagggagagcacaccgggcagccaatgtgccagaggtggaggctttggagagtgtttcatttgtgaagtcaacagatttaacattcagatcaggaggacgttggcatgagatgtggggaatcataagctccaaaacaatcgtgagacagaaggaaagatggccttttgttgagcagccattctcctccacggagagtcctgtctagtctgcctgttgaaggggcactgatgttagggaatagatctgtgtcaaatgcttcccacctcccagaatcctgtgaggcaggagtattatccccatttaaagagaggacactcaggctcagggaagtgactggcccaatgtcccatagctcataggtgccagaggtgggtcatccacaccaaagtcattctccttccataccctgaatgtcaccttcacgctggacccaggatcctgtgtggtgaactgtctcgatcacttccctaaaggttaaatcataaactcttactgccaaggcatatccacgaccttaaactctccctgttgggcaaaaacaatctctgatgttaaaaggcaggatagtggatacttttcagggaagggtaaatgacaagggcatgaggggaactctgggtgccggtcatattctgttttacaggtttgttcaatttgagacacttcatagagctgtagccttgtgcacaggcacttttttgcatgcatcgtctgcttcaatataaacctcttcctgttgtcttgtttttgtttttgtttttgttttctcttgttttcttgtcctgctctgtcacccaggctggagctcagtggtgtgatctcagctcactgcagcccctgcctcccaggttcaagcgattcttctgctcggcctcctgagtagctgggattacagaggtgtgctaccacacctggcttccctgttgtttctttaatgtagaaagccctgatagatggtgggaaaacaaagtttaaggtattcatagaaaaatacaaatactatttttaaggattctatatctggccacatggtgccatctcacgaagagtgtccccgtcccttgagggggagtggtcgggatcatggtcagtgtggggccctgcagctgcctgcttccctatgctgtgtggatgacgcccgcctccggtcattcccctgtgcttacataacagtgaaatggaacaacctgtatcagcacgagggccaagaattttcttctgacttgtggatacctccttccttaggcctctgatcagtctggacaaatattgccctgaacgcaaccaagcaaagccactcacctggtaaatatttgtatgagctacagttctggaagaacaaattccaatatcctgcagtccccttgacatcaaagacccaactctcccagagggcaatggcttttttgtccactgagaagccagtcagcttcgaagaaaggtgtctaaattgggagcaaaggtggcaatgatgtggacttgactccaaaagaaattttaaaaagaaaagaagtgcctttgcatttcagggggtcagtattggcatttttaaaatgtcaacaaataaatgttcatatccacacttgacattctttccaaggagaattttctagaggagacagacctcatcggtcagctctgatgccctgcagtgcaaaaagacattaaaaatgacggtaaaggacccctgcagagaacaactgagtctcttccttgccctgcgtctccagataaaggatgccctgcatccatcccctcctggctaagagcacagactccagaggctttttcctctcctggaggttaaagaggcatcacatatgtttaaaatctttaatttatatgtcacctttgtccttccttttaacttcatttttctcttatccagcatttagggactcatctttagggaggttcaaaggaaagctcatggcctttagaactggaagaaccatgttccagttgggacttgatcatttactaattgtgggattacagccaagtcacttcatccctctgctgtaaaaaaaaaaaaaaaaacaaaaaaaaacatatgatgacatttgtggaatggctccccaagccaaagagggcaaatattgtcacagctcatttcttctctcagttaattacttgcgtcctcggctgcctggctggcaggacaacctatattcgcctccctcttaaagcctcctgggttggccaggactccaagcggctttgtccagaatgagtagggtggttggcctggcctcctcagccaatcagagaggactagcatctgaacactcctctgtgctattgcttctagctgccacatggggacgctgttgaaacaccggcctggtgcagttggccatatgatgcttcagggtcttctgagacttcaagaatgtgctcacagggaaggtattagctctaaacacttgcctctgctagtttacatcacagaacagacagacaagactgttttgctccctcagctctctccttttcctagcttcagtcctggggagctcagaagctacagtttgttttttgttttttgtttttgtttttttcttgagggagtcttgctctgttgcccaatctggagttcagtggtgtgatcttggttcactgcaacctccgtctcccaggttcaagcaattctcctgcctcagcctcccgagtagctgggactacaggtgcctgccaccatgccaatctaatttctgcatttttagtagagtcaggatttcaccatgttggccaggctggtcttgaattcctgacctctggtgatcacccacctcagcctcccaaagttctgagattataggcgtaagccaccgcacccggccagaagccacagtttacaaatctgggggatttggggcatgggaacagaaacagaagagtcccaatgaaaggaagataccagctgagctgcccactctcccagctgcagttctcctgcccacagcaggccctagctgggacagggaggagccccagccttaaatcaaattcagaattttgtttatgacataagactgcacatcttaattactgaattaagactatattttccaacctatcatgactataggtgcagggcaagatcaaactccagtgtatgtggggcccgcagaagagatttaaagaaacagtgggggcagaaataaagctgtgtggttatcagatcccatgagtcttgtctgtaaggatgatggttacagtcgggatgctccagagtgcaaagccacatctcaaccagagttagtaacaagggagagtttactggttcatgtgaggaagagagaggaaggggagggctagccaaggggctggatgcaggaaggagggtccccagggttctctgtccccctcctgtcttccatctctgcctctctcagcaggttggcctaatttcctccgactgcagagaagcacacaagctgtggcacctggtgctcagactcacactgcaacacttccaccagtagatggcagagaggtactttcctgcctgttcagccacgaaaatcccaggggatggctctgactagcctaagtcaggaacctgctgtgggcaatcactgtagcattaagatgggggccagtgatggagccggtctgcagcacatgctcagcaaaagacaaaacccgcctgttttagatcactccggctgcatcacagagtgtggattgaacaggcacagaactggaggcagagaaacaagttaggcagctgcaggcataatccaggcaggagatgacagtatttgaaagaaggagtgggagcaagtctggagagaagtcgatggatccaagagatttttagaaggtagaatgtgcagaacttaattagttggtgcagtgggttgaatggtgtctccctaaaagatatgttcacctggaacctcagcatgtgaccttatttggaataagggctcttgcagaagtaagtaaggtgagaatcttgaggtgagatcgtcctggattacagtggaccttgtatccaatggcaaatgtccttataagagacagaaaaggaaaagaaagagacacagggaagaagatgtgaagatggaggcagggattggagtgatgcagcctcaagccgcagaatgcctggagccaccagaggttgggagaggcaagaaaaggtcctcccctagagccttcacagggagtagcgtcctgccaacgctttgattttgagctggtctccagaactaagagagaatagatatctgtttttctaatccaccaagtttgtggttattttgatgcagggcaggcaagcccccaaattgggttgtagcctgagagggttcttgggttcattcaggaaggaattcaagggcaagctggtggtattagacagcaacttctgttgaagcagcagtggacagcagcagcagaggtcctgctctttgcagagcagggctaccccataggcagtgtgcccagagtagcagctcgaaggcagttctgtagtcctatttacacccacttttaattatatgcaaattaaggggcagattatgcagaaaattttagaaaaagagtgctaatttccaggttgtcgggttgttgccatggaaaggggccgcaacttccggtgaactccatagtatgtggcacacactggtgggcgtgtcccatggaaaggtgcttccgccctgtacctgttttagctagtccttaatatggtccagtatccgcgccctgcctttggagtcaagttcaacttcctacctcaattgatgatagcagtttctgaaaactaacacatgtagatataaatataagtccttaagtctatcattattatgcatatcctataggggagtcatcgcgaatgaaactgaacttattgtggttcattcattcagatatttatttaaaaatatttattaaagcttactgtctgccagtccgatactgcactaggtaagtgctggggttacaaacagaacaagatagacagattagttgcccgcatggaacttatatctagtgggaagagaagcaaaaaaaaagtaagcaagcaataaacagtaaaaaaaaaaatactgggatttgagccataaaaaaagaaataagatgcagaaatcagcaataaggaggttggggagaagatccttctttagaaagaattgccagagaaggtggttgggataggcagaaaaaatagtaatattcctcttttatcttcacctatattagatgatcaatagatatttcctgagaaatgaaggactgagtatattataagaaggtatgattaaaaacaatcaccagaatgaatggctaacaagcacatgaaaagatgctcagaatcattagtaatgaaagaaacacaaattaaaccacaatgagataccacttcacacataaaaaggaattaacacttgctggtgaggatgtggggaaatgtcatatttccccacagcagccatagtacactgctggtgggaatataatatgatgcatctgctatggaagagaatatagtggctcttcaaaacgttaatcctagaaagcctgggcatggtggctcccgcctataattccagcacttcgagaggccaaggtgagaggactgtttgagcccaggagtttgagagcagccttggtaacatagcaagaccctgtctctataaaaatcaaataaaaaataaatagaggaaaagcacattaatcatagaactgccatatccaccacttccactccttggtatataccccaaagaactgaaaacagctattcaaagaaatacttgcacatgagtgttcagattattaacggaaaccaaaaggtggaaataacccacatgtctaccaatggatgaatcaataaacaacacatggtctatccatacagtagaatattgttgagccataaaaaggagtgaagtgctggtacattgccagaacatcaaagacccttgaaaacattatgctaagtgaaataagccagatgcgaaaggacatgaattatatgatttcattgatataaaatgtccagaaaaggtaaaaaatatccattgagaccaaaagcagattgtggttgccccggactaaagaaagagtaattacttaattttcctgggggtttcctcttggcatgatgttctgtatacaggacatacaaaaagcctttattttttattcttagcaaatacttaattagtactcaccatgagctgggcatgttctaagtcactttccaattactaacaaatcacttaattatattgacacaaaaagaatgggcataatgcataaagcaaatacgaacataaaaaagaaatctccctattaatatcatttatgttgaattcaatgcagggagcatttaaataagataaagggagatacttcataatccacactggtcagctaacatcatgactatctatgcagaagataaaccagcatcaaaactcataaagaaaaatttatagagagtaagaaaaaaatgaagaaacagtttagaggtaggtaatttgaatttactgttcggtgcataaaagaacaaataggccagacgtggtggctcaggcctgtggtcccagcacttcgggaggccgaggcaggcagatctcgaggtcaggagttcgcgatcagcctgaccaacatggtgaaacctgtctctactaaaaatacaaaaaattagctgagtgtggtggcgtgcactgtaatcccagctactcaggaggctgaggcaggagaatcgcttgaacctgggaggcaggctgggcgcagtgactcacgtccgtaatcccagcactttgggaggccgaggcgggtggatcatgaggtcaggagatcgagaccatcctggctaacacggtgaaacctcgtttctactaaaaaaatacaaaaaaattaaccaggcatggtggtgggcacctgtagtcccagctactcgggaggctgaggcaggagaatggcgtgaacccgggaggaagagcttgcagtgagccgagattgcgccactgaactccagcctgggtgacagagcaagactctgtctcaaaaaaaaaaaaaaaaaaaaagaaagaaaatacaggccacacagatggggagatgataattgcaagttatatatttgataaaggactttcattcagaatatatgaaatagtcttacaatttaataaaagaggacaaacaacccagtaaaatgtaggaaaaatatttgaacagatgtttcaccaaggaaaaaatacaaatggctaatcagcacatgaaaagatgctcaacatcatttagtcattaaggaaatacgaactaaaaccaccataatatatcactacacacctgccagaatggctataattttaaaaaaatggacaatactgagtgctggtaaggatgtggaaaaacagaaactctcataccttgccagtggcaatgttaaatgatacagctattctggaaaacagtttggcattttcttaaaaatttaaacttattatatgacccaacaattccactcctaggtatctacccaagaaaaataaaaatacatgtccacacaaggggacttgtgcataatgttcatatcagccctatttgtaataacaccaaattggaaggaatccaaatgtccattaactatgaatggaaaaccaacattcttacaaataattcaacaataaaccttcatgaaccttagaaacattattctgagtgaaagaaaccagacacagaagaccacaaggtgtaggactgtatttatttgacatttctagagaaagcaaaactgtagagacagcagatcagtgactgccaggggctagagacggaggcaagggttgatacaagcaggcaggaggttgctttctgggctgatggaaatgttcttatgctggattgtggtaatggttcacaactgtataaattaacaaaaaattatcagactatacccttacaatggtatgtacatttcatccaagtaacgctgctttaaaatttgaaattaagcacctaatgatattaagaaatgaataacaaaataaacccaaagaaagcaggggggaaaaaaagcaattggaaaagatgagagcaaaaataatgaaaaaaaaaacatctataatacatctagcggttggttccttgaagaaaaagaaagaaagaaatgaaaaaatcattaactatcctaataaagaaacaaaggagaaagaacaaatatacaaaataagaattgtgaatgaaataattgtagacacagaggatatcaaatgagtgactcctcaatccctctgcaaatagattcaaaatcttgaccaaatggatgattttctaggaaaatataaattaccaaaactgaccaccaaagagattttaaaaatcagaaaatatcgtttatcacagagatggtaaaaaccttgataaaaagtcatttacccagagaagcatctggttccaacagctttgcaagtgcatcctattaaaactttattgattggcaaacgctaattttttttaatttttatttttaattatactttaagttctagggtacatgtgtacaacgtgcagttttgttacatatgtatacgtgtgccatgttggtgtactgcacccattaactcgtcatttacattaggtatatctcctaatgctatcccttccccctcccctctccccacgacaggccccagtgtgtgatgttccccactctgtgttcaagtgttctcattgttcaattcccacctatgagtgagaacatgcggtgtttggtcttctgtcctttcaatagtttgctcagaatgatggtttccagctgcatccatatccctacaaaggacatgaactcatccttttttatggctgcttagtattccacggtgtatatgtgccacattttcttaatccagtctatcattgctggacatttgggttggttccaagtctttgctattgttaatagtgccgcaataaacatacatgtgcatgtgtctttgtaacagcatgatttataatcctttgggtatataccctgtaatgggacggctgggtcaaatggtatttctagttctagatccttgaggaattgccacactgtcttccacaatggttgaactactttacagtcccaccaacagtgtaaaagtgttcctatttctccacatcctctccaacatctgttgtttcctgacttttaatgatcgcccttctaactggtgtgaaatggtatctcattgtggttttgatttgcatttctctgatggccattgatgatgagcgttttttcatgtgtctgttggctgcaaaaatgtcttcttttgaaaagtgtctgttcatatcctttgcccactttttgatggggttgtttgatttttttcttgtaaatttgtttaagttctttgtagattctggatattagccctttgtcaggtgggtagattgcaaaaattttcacccattctgtaggttgcctgttcactctgatggtagtttcttttgctgtgcagaagctctttagtttaattagatcccatttgtcaattttggcttttgctgccattgcttttggtgttttagacgtgaagtccttgcccatgcctatgtcctgaatggtattgcctaggttttcttctaggttttaggtcggacatttaagtctttaatccgtcttgaattaatttttgtataaggtgtaaagaagggatccaatttcagctttttacatatggctagccagttttcccaacaccatttattaaatagggaatcctttccccatttcttgtttttgtcaggtttgtcaaagatcaggtggttgtagatgtgtggtattacttccaagggctctgttctgttccattggttctgttctgtctctgttttcgtaccagtaccatgctgttttggttactgtagccttgtagtatagtttgaagtcaggtagcatgatgcctccagctttgttcttttggcttagaattgtcttggcaatgcgggctcttttttggttccatatggacgttaaagtagttttttccaattctgtgaagaaagtcattggtagcttgatggggatgccactgaatctataaattaccttgggcagtatggccattggcaaacactaatgtttttaaactgttctagagagcatggagaaaggagaaaaccttccaaattattcctgtgaagcttgcatgtcaatgattccataacaataactatagaatcaaataaccacaataaaagaaaaacacagaccaactccacttatggatatagatgtaaatattctaaatacaatattagctgatagatctaacactgcattaaaagatttgtggaaggagttgttcaatattaggaaatccactctgtgattatctcaagttagcaattagatgtatattcaatgctgaaataacagaagcaccccagtttagtcagaaataagacccaattacccattatcaccaccaccatttagtattgcactggggaattaccaattcagttagacaagagtggggaagaggtacaaaaactagaaagaaggtggcaaaaacaatcattgactgtatgattggaaaaaataagagaatcaattgcaaaaccattagaaagagcaggataattcaggaagctcagggggcacaaaataaatgtttttacaaaacaatatccaagaatctatattaacaacaatatctttgagatataattgaatagaagattccatttacaataggaaaccccaaagatagaacacccaagagttgcacaaaatttacacaaagaaaatctaaacaacagagggacaaaacggaagatttgactacatgcaagtatatttcctagtcttgggtagaaagactcatctgcataaagatgacaatccttcctgaattaatctataaatttagtataattccaatggaaatttcccttgttttgttgttgttgtgctgtttttgttttgttttccagactacactgaatgccaaatattccatttagtgattttcttcttcccttttcctttctaatgacatattttgtgcttttcagacctgcctttctttctctcggcaccaatgaataaagttccagctttaaggcttgaaaaatcacagcaaagttgcagcaaaattaaaaggaaaaaaatgttctttttttttcctgcagctgcagagagtggcagatagcatcctgcgtgataaacgcctattcttggctaggcgcagtggctcacgtctgtaatctcagcaacttgggaggccaaggcaggcaggtcacctgaggtcaggagttcgaggccagcctggccaacaaggtgaaaccccgtctctactaaaaatacaaaaattagttgggtggtggcgcacacctgtaatcccacctacttgggaggctgaggcaggagaattgcttgaacctgggacgtggaggttgcagtgagctgagatagtgccactgcactccagcctgggtgaaaagagtgagactctatctcaaaacaaacaaacaaacaaacacctatccttgcctatgtcattttaacaaaggaggaagtaaatcccctggatttcagaggctgatgctctgcccaagaaaagcaaccctaacttccccaaaggctaaaattcagactgattggctctggcagagatatttaaattgatacctctgtttcctcaaaggtataagcctttgcgaactttctttggtttctctcttctctcacaggaggcaggggataaacaaatatgttagatttcttatttaaacaaagagcttgagggttttgcctcatcgaaattaacagagacaagttgatgctaatatttttatggaaaatcgaatatgcaaaaatagccaaggaaattccagggaaaaagtaatgaaagaaaatatcaccaaaagatgttaaaacattttggaaagccacagaaattaaaagtgtttgatcctagcatataaacaagcagacaaggggctgggcatggtgactcatgcctgtaatcccagcactttgtgaggccgaggctggtggatcacccgaggtcaggagttcgagaccagcctggccaacatggtgaaacctcgtctgtactaaaaatacaaaaattagccaggcatggtggcacgcacctgtagtcccagctacttggcaggccgaggcaggagaattgctggaccctgggaagcagaggttgcagtaagccgagattgcaccactgcactccatcctgggcgacagagcaagactctatctcaaaattaaaataaacaaacaaacaaataaataaataaacaggcagatagatcagtggaacagaataaaatccagaaatagactgaaaacattcaggaaaacagtataaaataaaggggacatttcaaatcaatggagaaaagattagttatctcagaaatgaatgggacgattgagtagactgggaaagagtaaaactggagctctacacacaccaaaatacattccagatggggctaagattttatatatctatatatgtttaaataaagccatgaaagaactagagcaaacatgagagatttatttttataatcccagacggtggcaatctttccaagtgtggcacaaaagtcagaaatcattaaaaaaagactgataaatccaactacacaaagttagacatttctttatggcaaaaaatgctatcaaaaagtcaagagatcaatgataatgggggaaacatttgtaacacatacaataagctgtccaattttttaatagtcaaagactttaacattaagaaacagaccagctggctgggcatggtggctcgaggctgggggatcacttgaggtcaggagttcaagatcagtctggccaacatggcaaaaccccgtctctaccaaaaatacaaaaattagctgggcatggtggggcatggtggtgcatgccagtaatcccagctactcaggaggttcttctggcttctcagcttgcagacagcctattgtgggaccttatgattgtgtgagttaatacttaataaactcctgtttatattatgtgtgtgtgtgtgtatatatatgtgtgtgtgtgtgtgtgtgtatacacacatatactggaatatatgtatatacatatatacatatatacacatacatatatatacacatatacatatatacacatatatatacacatatacatatatacatatatacacgtatacatatatacatatatacacatatacataaatacatatatacacatatatatacatatactatatatatacatatacatatattcattccattagttctgtccctctagagaaccctgatgaatacagtgggctacacacctattggaatggccaaaacccagaacactgacaacaccaaatgctggtaaggatgtggcgttttttatccgcattcattgctgatggtaatgcaaaatagtgcagccagtttggaacacagtttggcagctctttacaaaacggcgtgtactcttaccatacgatccagaaactgtattcctaggtatctacccaaaggagttgaaaacttgtaaccacacaaaaacttgcacacagatgctcatagcaagctttatttattattgcccaaacttggaagcaaacaagatgtccatcagtaggtgaatggataaataaactgtggtgtatccacacagtagaatattattcagtgctaaaaagaaatgagctatcaagacatgaaaagacatggaggaaactgaaatgcatatgactgagtgaaagaagcccttatgaaaagctacatactgtatgactctaactatgtgacattctgaaaaaggcaaaactatggtgaaaacatcagtggttgccagcagttgagacgggtggggggaagataaccaggtagagcatagaggactttaagggcagcgaaaatgctctgtatattactacgatggtggatacatgtcattatacagcaggtccttggatgacactatctcattcaacatcattttgctataaagttgatgagaaaaaaaagtcaattcctagccaggccactgtctctgtggagggtgtgcgttctccccatgtctgtgtgggtttcctctgggtcctccagtttcctcccacatcccaaagctatgcacggtaggtgaactggcatgtctacatggtcccagtgtgagcgagtgtggaagtgggtgagtgtgccctatgatggaagaggaccctgtccagggttggtgtctgccttgaccctgtgcctctgggatgggctctgccatccacagctctgaagtggaataagccagtcaataatattctcgcttgttttttgttgttgttgttgtttgtttgtttttgtgacagagtctcactctgttgcccaggctaaagtgcagtggcactaactcggctcactgcaacctccacctccagggttcaagtgattcctgtgtctcagcctactgagtagctgggactacaggcatgcgccaccatgcccagctaatttttgtatttttagtagaatcaggattttgccacgttggccaggctggtcttgaactcttgacctcaggtgatctgcctgcctcagcctcccaaagtgctgggattacaggcgtgagccaccgtgctcagctttcacttgtttgtattaatctttcctaaatgtatgtatggctcacatttatttcaatgtttagtattagaagtgtttgaggtctttgtaagtttggtgatgttttgtgaccagaaacaggccataggaacttaactcttgtttatattaattagcttatggtaaaattggataaatgttttataagagacatgaaagggcatacagacacacaggagagaaggccacgtgaagatggaggtggaggagacagtgatgcagccacaagccaagggatgcaagcggccacctgcagttgagagaggcaggaaggatcctcagaaggcatggagcctacgaggaagcctggccctgctggtaccttaattttggacttccagcctccagaaccatgagagattacatttctgttgtttgaagccactgatttttgtggtcattggttatggcagccacaggaaataagataatcacccacttaattttcctagaaaagctgtgttttgaaagtcctcttgaagcctgggttcctctctctgcatctcccagttttccctcaaagcttgtggattctccattcctcacattaactcaggcctttcattgccaagtgaccccgagtcctgccttcgcgggtgctgggggagccttcctgacccactggaagtggacctgcccatctccttgctgtgaaactgcatgagggggcttgtgtctgaggattgtctggcgtgaggggagagacaccacgtggggacagaggagtggatgagcaggccggggcatgacggggccgtgacagggacctggccttccattctgtggaagcctgagacaagcagcaacttctctcattcctcctctctatgacaagacaggaactgggacactcaccttactaccctaattcgctgagcctcggaagaaaagcagcttagatttttaatcccatccaagatggaggccctcctgctcctgctgccttgttctcaccccctttcgtgatgtgcgaggccatcggaaggtgtggaatttctccactgattcctctcattgtccctttctccctactcctggggaggctgcaatggtgacctcatccaccttcagaggcaggtgctggaggaggaaaggatgtgggagttcaagccggctgcagaggcccaagagcccagatggtgtccttccagcaaactggagaggcactcctcctaccaggcagccactgccccactccagggcccctggctcagctagggaagtggggctgggtttcaccccctgctcatcccctaaggcccagtgctggactcagtgcagcacctgcccagccatctctagcagcggcataaagcataaaatcaaggccaatgttacgtgctgccttgacatgtggtaaaatgtgaagggcctcaagtggcctaaatgcaagctcctgtcccacctctgctcccataaatagggtctcccagctgggcaacccttctcatcccagggaccaggtaccacccctgtttgttgccaagtagcaggcttcagttccctgccagtctgcggaattatttaacaacctcatgaagaaaccaggggccactccaccctctgtattagcctgttctcaggcagctaataaagatacccaagactgggtaatttataaagaaaagaagtttaattgactcacagttccacatggcttgggaggcctcagaaaacctacaatcatggtagaaggggaggcaaacatgtcctccttcacgtggcagcaggaaggagaagtgctgagcaaaagggggaaaagtcccttataaatccatcagatctcatgagaattcactcactgtcatgagaacagcatggaggtaacccccacatgattcaatcacctcccactgggtccctcccacgacatgtggggattatgggaattacaattcaagatgagatgtggaaggggtcacggccaaaccatatcactcttgttactaccaaacctgctgtccaacaaccctgctgttcactctgctcttgagcaccacctcatgtggccctgcatagcctgcagtggcccttcccctgggctacgagtatatgtgactagaaaattgccgtgggtctcacctatccagtgttgggtgttgtgtgtccagccctagagtgggactccttccctcacgaatggggtgaatagaaggtgataaaaagatctgagtctagggatacctaggaggtggaatctcttctccatgcatagcatgagtgatcacaggcctgaaaccaaaagggacttaggtctgggggagagattattttccaggtgctgaatattcctgggataggggagggagctaaacaggttcctgcccaaaggaagtgagaagggggtcctagcaacttctcagggatttagagctgtgactccagggcctttgttcagaggagctaccttgcaaggaacttctagaagaatgcttctctttctcagcatccatcctcccatttcatagtcgtgcccacgatgggccccgtctccctgaacttgatggctgaatagaagtgtagcctcccaggggcatctaaaggcactcagagccccttacccagccccagcaggcacctgcctggctgcccggtcctcagggttccctgtgcattgagcaatatcctcaaagtgaccaccagggggcagcagcacccagactgccttccactgcacctgcagatcaacaaattccagtattttgggggaatatctgtgataacttggctactgctttactgacctcaggtaaatagacagaccaatgtgcttgaggagccaattgctttaaatctcctgactcattttttgtattaagatttgttttatttatgcaattattctgtttactcaaagactttaccagaagctgggtgcagtggctcatgcctgtaaccccagcactttgggatgccaaggtgagaggatcgttggagcccagacattggagaccagcctgggcaacatagtgagaccccatctctacaaaaaatttaaaaattagctgggcgccactcatggtggctcaggcctgtcatcccagaactttgggaggccaaggcaggtggatcacctgaggacaggagttcgagaccagcctggtcagcatggtgaaaccccgtttctactaaaaatacaaaaattagctgggtgtggcggtgggcacctgtaatcccagctactcgggaggctgagacagcagaattggttgaatctgggaggcagaggttgcagcgagccgagattacaccactgcactccagcctgggcaacagagtgaaactcagccctccatcccgaccccagaaaaaattacctgggcatggtggtttgagtctatagtcccagctactcaggaggccaaggtgggaggatagcttgagtctgggagggtgggagtctggcttgagtctgggagggcgaggctgcagtgagctatgattgcaccactgtactccagcctgggtgagagagccagaccctatctcaaaaaaaaaaaaaaaaagtaccagcccctatctacccattcatagctttatgtccatttcttttgtcttcaagcactggtatcctttacttatctctcctcacctgatctagtgtttacatctcatttgcgcccatagagaagtcatacactgatgtggattttagatagggcacgctctcaagacagccacatgtattattctgtgctcacacagcctggcctggagatgcaaagattatggaatccagaatctaaatgagaggatcagattaatgggatgttctcacagtgtcaggtgaggacagcctgatgcagcctttcatcatgaggctgggacctctgggtcccttggccccaggaccacactcgaggacatgcctgttcctgccaacatggctgggcagagttcctcttttctttccttttcttttcttttctcttctcttctcttcttttcttttttctttcttttcctcttttccttccttccttccttcctttcttctttcttctttctttcttttctttctttttctttttccttctttctatttttttttgaaatggagtcttgctctgttgcccaggctggagtgcagtggcacactcttggctcactgcaacctccacctcccgggttcaagcgattctcccacttcaggctcccaagtggctgggattacaggcacccaccaccacacccagctaatttttgtacttttagtagaaatggggtttcgccatgttggccaggctggtctcaaactcctgacctcaggtgatccacccgcctaggcctcccaaagtgttgggattacaggcgtgagccaccacaccctagccctgagtctgtttatgcttctgtcaggtgtggcatgggcctgcctgggagctattctttttctgtaaagcacaggcagttaatcagtggtctctgggaagaatccagctcagggttatatttcgtttgacccactcaagttttaaaaagtaaattagttgccaatgtgcaaacattagaagagttcacagcttctccaacaatacctagaagttcatccgatggtgcccgcattccctgctctgtctagatggtgcccacattccctgctctgtctagatggtgccgacataccctgatctgtccagacagtgcctacattccctgctccatctggatggtgcccacattccctgctctgtccagacggtgcccacattccctgctctgtctggacggtgcccacattccctgatctgtccggacagtgcccacattccctcctccgtccggaaggtgcccacattccctgctgtgtctggacggtgcccacatttcctgctccgtccagacagtgcccacattccctgctgtgtctagatggtgcccacattccctgctccgtccagacagtgcccacattccctgctctgtctagatggtgcccacattccctgctccgtccggacggtgcccacattccctgctccatccggacggtgcccacattccctgctccgtccggacggtgcccacattccctgctccgtccggacggtgcccacattccctgctctgtccagatggtgcccacattccctgctccatctggacggtgcccacattccctcctctgtctagacagtgcccacattccctgctccgtccggacggtgcccacattccctgctctgtctggacggtgctcacattccctgctctgtctagacagtgcccacattccctgctccatccagacggtgcccatactccctgctctgtctagatggtgtccacattccctgctccgtctagactgtgcccatattcgctgctggctgcaaatgcgaggagttgacagcagcctcccctttacaaggcaggaggtgccactgttcgccattgtctccacctagggcttcacttgctttctatctgcagacatcagagggacccacatctctctgttctgacacgctgtgtgttgatggcagagtttaattatccacatgcaatcttactttccttattcccaagtccgtggggctgcctcatcaaagcattgtaagaactgataaccatcttctagaagtatcatagtgatattaagaacacacatcacagatcatagtaaatggctttaattttttagcgaaatctcactactgcaaatgcattgttgtcctagctaatgaatgcatagagtattgcctgcaaaataataattgagattctatttttaagaagcttagaacagtacatggtgcatagcaaagactctgtgtatgtgaagccagattttaaaatatggtaacaagtgtctgaaaatatgtggctcaatttgtctcccggttacttttccctctccccctttaaaatgtagaggaaggagaagaagagataagaggtttgtgagtgaagacaagggccctttaaggcctgggaagactaacgccatagggatctccctctgccttaaaaggcacaggaatcttagtggggaaaaagaagtggtgataaatagccagtccgtgtgcctggaatatcaaagtcagtgcgtgccagggatcacactgcgggtcacgtgcactctgggtctctctctgcaaacctgccctgcctcagtctgggaatatgcaactgcctaagaagggtctggcttacacaggggccgtgagacgtggcaggcatagctgggctgctactggtcatgaatcctggacacggcaggcaaggtgtggtgtccatatgcattattcgggtggggcaaagatcacagctctcactagactttcagaggactttgtaacccaaagaaccactcatctcaaggactgtggtaactcaggggctgagccatgccagtgtttattatgtgaaacaaggactggaacctcacaagaccaagtctgtccatttgaggatggcccaagatgcacacgggctgcttttatcttatgcgcaggttttaaaaaaatatgtttcatttaaatattccatactcttcaggaatgcccaggcagctgagctttcaggatgtcgcattgcagaggactccaatgctacatatggcagctggagaccctttcaaggcaggtggcagaacggaggccctctctatctgctggggcagccctccgggtgccccgctggaaggcagagcagctccatctctgggtgggtgagaggtgctgcatgggctcactatagtatcccaatactgtatggcagtaggctgccagagtatcctaagctgggtggcttcaacaacaggtactgactcacagttctggaggccaaaagtttgaattcaagcagggctgtgcttcctctgaaacctgtgggagaggagccttcctggcttcttcccgacttcttgggatggggatgcgcatccatcctcggccttccttggtttgtggctgtgtcactgcaccctctgcctctgtcacggcatggtgtcctccctatgcatctgtgtctgaatttccctcttccgataaggactccagtcatattgggtgagggcccaccccaatgacctcatctcaactagatcatctgcaaagactctatttcccaattaggtcacattgaaggtacctgtctttttgggggatacaattcatctcacaaaaccggcccatcacctcaaaaggacctgccaccccagtgctatgtgtccctctctgcccagagccactccttcccctggctctcggggagtgggggcacctttccctgctcccacagtgaccgagcaccttccccttggtatgcattctgaagggggcatttttttctcctccatctcagccctgtacaaagcaagttctttctagattgaggtgtgtatgtgtgtctatgtatatgagtgtatgtgcctgtgtgttttcagggagatgtgtgcaggatgggtgcaagggaggagtggaaggcggaagggcaggaggaggatagagccacaagagtgagcacagaagtgacaagggcagaatcagtgtgtgcttgtgacaagtatggaaatgtcatgcctttaggttcagtcctataaggtaggtgtatcagtaagggcattgattctgcgaccttaacagagatcagaataacagtggcttaaggaagagtggagtggatttctctctcctgtaaatctggcctggtgggtggtaaggaggatccacgtcgcccaggcccagatgtgtgtggctctttgagtgccccgttctttcccagtctcataactgctctccacctcctccacatccagccactgggaagcaggacaaagttagttaagggcacgttcttttctttccaaggattacttggacattacagtcttcacttccatgcctactggccagggcttagtcacacaaccttgctagctgcaagggagtctgggaaatgcagctgctattctcagaggccatgtcctcagggattctgctaaatttagcaaggcagggacagatatgggggaaccactgacagtctatcacaaaagaacgtgattttagagaaacagtgaaacagtgtcattaatccacccctcaccccttacaacagccaaaaagaaatccagtggtatccatcacaataaagagtatgagaggaatgtgattagaaaatcaggttgccaggcaggatgtgtccagttttagccagtggtggggttcatggggaaggcttcgtctcaggaaggtgtgtgttgggttgttctatggccagatggttttcaacgacatagcacgacctgtagctctccaggacccgggcctggacataggccttgtccttctcttgccaggcatcggactcgatgtagacgttgaatgggtcgttcgagtgctccagcttcttggagcggatgtagctcagcatgatgcccagggtgaagaagccgaagaatcccagtaccatgaggacgtagagggcctccagcttgccgtcactgctgcggggggacctgcgggccaggcccgacatgttgccaccctgctgaactgtctcctgccacagcttggtcagaaagggcgtcaccgctgtggtgttagacaggatcatcctgggcattaaggttccactgctgcagctcaaacttcccaggcacacctcttaaaggaaaaatgcaaccccaaatcaaaaagtacgtattggccaaaacccacacgtacgcacacacacgtatacaattttaaaatctcaggtgagaggggtgagctgacactccacaggccatggcatgtgccatcttgggtctgtgcaatgccttctcttgatagatgaatggatacattgattcccttctatttccatccaccactccaatctccacccctataggtgaccatcagaatgagcttctttaatatgcattgctgcatattgtggcgtatggggttgcatgtgtgcattttggtttacctaaatggtatcaggtcatccaactcattcagtctccttctttttcctcatgactgtgcttttgtggctcacttgcggtgctgggtgtgtgcattcccttgcttccaatgtttgtatacaacccatggtgaacacccacttcttttctctgccttctcccccagagatggacactgctgtggctgctgactccataaacaagggggagacaaatatccccatccttgacctcctatggacctaaaaaaaatcacgcatctcatacaactagttcctggcagcttatgcaagactagtcagactggttgcccttggaagcaacgtgcaattggtggtctgtttcaccacagagcatctctctatgaacagttacattcatctgaatgaaaaatctatgctgtcacgtggtggacttcagaatgtctagggagatttcacagagagctcccctcgaagaggccagtgttgtagcttgtgctatgtttttccctccctgcccacacacaggcacacacacgtacacaatcttaaaacctcaggtgagaggggtgagctcacatgctccctagtccatggtatgtgccgtcttgggtctacacaatgccctctcttgattgagcaatggtacatggattgccttttatttccattcactactctctggctatgcagaaagtgacattttccctatcgtttaatcttgatatcactgtccctgtatactcagagtgggcctgggaattggaaaaattgtctccaagtagctgtaagattctgtcaggggtttggtttgctgtggaaaccccatctaggtgaccttgagatcattggtaagctgaaaaaaaacaggtcttgtttttatttatttatttatttatttatttaggtttgagcaaatgccagcctctacccccagttcctgctgggaaacaaaagctccgaggccaagttgttgatgtcacattccaaactcaagccagagggggccactgggagcttatcacacgtaagtgctcccactcagttctttctttttctgttttattgagacagggtctcactcttgtcactcaggctggagtacagtggcacaatcttggctcactgcagcctcaacctcctggactcaggtgatcctcctaccctaccctccagagtagatgggactataggtatgcaccaccatgactggctaattttcgtattttttgcagaggtgaggttgccctatgttgccgaggctggtcttgaactcctgggcttacaggatccgcccacctcggccccccaaattgctgggattacaggcatgagccaccctgcttgtcccctgctcacttcttaggagcttaaagtagctgagtagaacatggcctggagtagaacatggcctcggggggactgttgtaactacaggtgaaggatgtatttgggaagacagtttatggccagaatcgctatggaaagacaaattccaacacttgccgggacggcgctgtctttcccagccaggatggggactgtgacattgcacatcatcttgtgtaggacaaataacctcagaaacctagctcctctccagcttagacccagagctatttcttcattgaattggtttaattgtaaaacataccctgaacccagcaccagctgaagacatctggcacctttccgaggcccctcttcctctacccatctctgaactctggctgtgtctcagagttctgttacctgctctcttctcttcctactctcctctctcccagggtgactgcacctgctccaggctcacctgcatggccatgacccagggctctctttaagctccagagccatgcgtccagtgacctgctaaggagatggttccctttggccatccccaggctccttaaagttaacactccaccctgtcctgtcagagactggcccctgcctcattgagctgagtggcaacaccactcactccaaaatctgcatcactctcactgatgactgcaatctcatcatggcagttcccatcttgaaggccttccttggctcctccctgccttcagggtgaaactcctggtcttctgcatggatacaggccctaaatttgagagtctatgcatccctctccaattccactgttgccactgtgcccagaccctatgctccatggtccctgctggccccggagcctctacacattgtgcgtctccagctcagactgcgccttcttcttggcccatgaaacttctcagcaatgcctactcatgcttaaaattcagcccagctctcacctccttcccgaagcctgctctgatacatggggctggatcagcactgtgcacaccatgacccctgctaacctcatcatggtcaggatctccaggccccttatcccatccctgccctgccatccagcctggtgctgggcacgcaaccacacaggagctgcccatgaatgtttatcgaatagatgccaccagaacttaataccttttgaccagtggggcttgactctttataacctgcttactccaatgaacagatgccaatgagctgtctccgaagctctaactgactcccttttccagaagggcagtcatctcccaccctgaaccacagtctcagaaggcaggagtgaggagcagaaagagctcagattttgggattccactgccgccacaggtttggattctagctttgctacttcctggccacatgatcctggacagtttccttagaattgttcagtcaagttttttttttttttctttccaaagtagcgagaaacaccactgacatttgcgggctgttgaatcactgagcaggtgtgtagagtggctgacagcatgtggcacatggcaggtgcacactcagtggtcctgggtaggagtttattggtttttctacctcattaagaaattgctgcccaaggatttggggctttgggggtttaggcttggctttcctgtggctgaccatggcagctgtcttctctacgttgtggagagatcagacatgaatgagaatcaaagattgtttgtggcctttcctggtttctaggcttttgagtctgtgcagagatctgtcaggggttaagctgcctgggctcaagagattcaggtccttgttcttgtacaaaactagcatttagccccattctaaccatcggggtaggcaggaattgtttggtaacagatccaaactcaacgctcaaccatttctttttaaatgacccgaaaccacttatgaatgcataaaaccctgccccagaaaacagacagacctggacctgatactatgatgtaatttccaaaaacccagaatgatcacaattggcaaataattctgccaccaatcactgttagagagtctttccaacttcatgaccatgtgaaggtagaattatggcaggcgacatttgaagatccacaagttaattggtttaaaactgataaatccatacagcaaattaagagttacatctgcaattaattcataatagtgagttcactgagaaggcttgttacttagatccagatggactttcttatgtccaaagaagcaaccaaaaacatctgctttgaaaacctcccaagcccaaaccatcctcagccttgttctttagaatgctttagaatgaccttgttaaaatgcagattgctcctgtaatcccagcactttgggaggccaaagcaggtggatcacttgatgtcaggagtttgacaccagcctggccaacatactgaaaccccgtctctactaaaaatacaaaaataagacaggcgtggtggcgggcacctgtattcccagctatttgggaggctgaggcaggagaatcacttgaacccaggaggtggaggttgcagtgagccaagattgtgccattgcactcctgcctgggtgacacagcgagactctgtctcaaaaaaaaatgcagattgctgggctctattttcagagtttctgatttggtagaactggagcgggcctgggaatctgcattcctaacacattcccacgtggtgctaatactgctggtctggaggccctgcttggtgatctattggaatcaccgggggagcttttagaaaataatggttcctggatctcacccctagagattttaatgtctttggtctgggttcctgcctgactcagagactttttagaaacctcccaaatgatcctaatttgtagccaagattgagaaccactgggctgtggtgtgggaccctaggaaaatgaccaatggccttttgtgctgcagggtacctggaagaattttgcaaaaatatagaaatatgatctcactgactgtttttcaaatcttgtttgttttttacattttcttttttggccttgtttgcctctgatacagtctgaaaagaaattgcagaaagaaactctccagtcttcagtgtaacctcagctgtccccagtctcacacacgctggtgccttcaattacaattctcctgtcagagcttaagtccagctaattaactgcctttcaaatgacaaccctatatttttaaagaatttttttaaaacttcacatgtaatttattgcattgcttttgctaaatgtcctccacacccccaatgcctgctaggctgggtcgccatggtatttttgtgtaacgagtctcaaaatgagtttggcaatgtctccgtaatagtcagcatggtgtaaatgacagtctggatctgcatgtcatttgggattttatatcagattctctaggttcatttctatgatacgtgatgccaaagcacccacatgccccgtggctgcactttcagacagttggactcaaacagagtgggagagcaactgatccaacaatctgaattttcagaaaacggggctccttagagatgagatggcttgccaaaagtaatctctcctatcagaagtacatatcctcagcaaactaacgcaggagcagaaaaccaaacaccgcatattctcacttataagtgggagctgaacagtgagaacacatggacacagggaggggaacaacacacactggggcttgtcggggaaaggtgggtggggaagagcattagggaaaagagctaatgcacgctgggcttaacacctagatgatgggttgacaggtgccgcaaaccatcatggcacatatttatgtctgtaacaaacctgcacatcctgcacatgttccctggaacttaaaaaaaaaaaaaaagaaacaaaaacaaccaaccaaaaatatatctaaaatgtcatctgttagcaattgactcacatattattagtatagaaaagagcaattcccaggaccttgtacagaggaagcaggctcaaaacagctgaggaataggccacttttatcagatagcattggatccatgcacatgggggttggcttcttacctaaatatgccatcagaaatcatccttgttcctgtcccctcagcttttgtagcttgcacagtgagtaaagggatggtggaggcagaaatggtaggagccagagatgttcaaaatccatctgatgcttggcctgtgctgaacgttctcaaactgtggccttgtcaggcccagaaagtggggtggattcctggccgtttctgcttctgcctgggtgtgagatgtgaatgctgcccctactgaagggtagtgcaattttttttttttcttaaaagcttagacccagagctgctaatctactggaaatcactcaggacacagggctctgggcagctgcgctgagcgagacacctgcaaatggagaccaacggggcctccagcaccctggagttccgtaaggcccccagctgaacccaggggagaagagggcagtgggtggcgcctcgctgctctgggcacacaccacctcttctgacttctcccacgtgctccggctgtgtcgcctatcagcactgataacagcctggaagctttcagaacagaagctttcccagcatgggaaactctcattctttcttttttttaattttccaaagcctttatttctaagaccaactgtggcctacccgtgcataaactgggcaggctgtagacagcaggcttgccaagtaaatactacagccttcctcccaatattgagccctgtcccattgatcctgcaggggagatgtgtagggcatttgttcacggggaggccacaagtttgggcctctcatcactgtgacctcacacccctgttgagtgtgtcgtaaacagaggagccgttcttcaagccccctgccctgagtgcacccctctcattcttttgttattattagcaaattcccccagttcctgatcattctttcttaagcctttagtgactgggtaaggttcttgtggctgactccaagctttcttctaaaaggaatagattctaggggtgagtagaggagacaggaatgtcggagtcagagctcaggaatctgggttccagccccaggtcaatcctagataaactagagggctccttaacttacttccctaggttgactctgggtttttttatcacgctcgacaggactccttatgcatttcttcgaaagagcatccagtcttaacatcatcatttggcctcatttggtttaagaagcagaattagggtaaaagcaatgatggataagcctcattttggtgaatatgatcttattgagacaagaattctgagtcaattgtccttggaaccaactgtctattgttttcatctttatcacaacactatgtccaaattttggaaacatgtttccctcctagcagaaaagaagccacccagggccaccagatgcttcccgacacttggctggctttgtctggtcttctatccttcccctatccccagagtcagtgggtactaaggtggccagggtcgctcaaggaatcagaatgcaaccgtccagaggcccagaatcagactgtcctctctgattaggaaagtgtttcctgccacctcccagggggatgtggggtgtggcttgagtctggtgcttttaccaggagcttcccagacctctctatgggtgatggagagagagtctggggtgtgaaggatggaaatataaacactgaatactcagagagtcaggccagcgagctggtgaggagactccatcaaactcaatatgaaaacatgggtgggcgtttggggatggataatgaatgacagctgaagtcacacatcaggagggaaggaaggactctcatcttcagcaaatgacataaatctggggagcctcagtttcctcacctgaacagtgagaatgatggaatctaccctgagtatatatcccaggtctttgtgcagcatggaatcagcccccagccttcctagctcttgctttattttattttattttagagaccaagcctcgctctgtcactcaggctggagtgcagtggcgcgatcttgacttactacaacctcctccgcctcctgggttcaagtgattctcctgcctcagcctcctaagtagttgggtttacaggtgcatgccactatgcctggttaatttttgtatttttagtagagacggggtttcaccatgttgcccaggctcaacatgcctgggctgaagcgatccacctgccttggcctcccaaagtgctaggattacaggcgtgagccaccgtgcctggcctcttgttttatgtttgctgttctcgctgtaggtgaggcattcccaccatattcccttgttaaaatcctactggcccttcaaatgccagctcatatccacactgtgtctgaccctgatccagaatcctctccccttctttgaccccttgtatatatctttcctacagtgctggtcatattctaacttctaatcatttgtagacttatctgggcattttctcccaggaggtcccaaaggacagagaccatcttgctcacctttgtccccactccagcacccagaatgtttcaataaggttttcctgaattaagtgggaagcaaagtattagattcaataccactacaatgggaaagtgagtgaataattgataaagtatactatgctctggaaatagattattgagtaatcagaggaaaacctcttgcaatgtagtatgtttttatatattaaattttatattatttatttatatttatattattaacatatttttgttattcattttgtttattaagatttactctatatatatatgtgtgtgtgtgtgcgcgtgtgtgtgtgtgtaacccaccttatttctaaaaaaaaattttggcagtcagtgactattaatagtagagcacaaactcttaacctttttttcctcccgctttcccagagtccttatcaccttctaatataataaagttttcttaactgtgatgttgattgttcaacgtttgtctttcccaccaaaatgtaagctattgcgggcagggatctttgcatgggttgttcttcattgcatcccaggccactagaacagtgtgtggcatatggcaggagtgcaataaacattcagcgaatgcaggcaggcatgcgtgaacgcatgaataataagtgttcctttcaactaccagaaagagcgaaaccacacaggagctgtctcaccctcagagatttaagacgacagcaatgagtccctctgatgtcttctaagtgagctttattttcaaaacaaatcattttccaataacctatcaaaagcaggtcctacctgaatatccttggctatttcctctggatacagataatgccttcctccaatggatcctcggctcacctgatgattgtgtgaaactggccagagaaagcagagggatttttcctggtgattggaaatcagagtcacggctgaatttaagcaactgtgtgaactcagcaaagtccccaccacctggaccatacatgacagctatggttattgacaaggtccttccttaatggagctggaacctccttcttaatctaaatgtggactcaaatgaactgtcaattcacatagagcaatgtgacaaatccggggggcaaagcattatgcaatagattgggcacatgcgcacgtctctgctacttagtcaactttcttctaaagtttcccacttttcccattaccacaatcaagatcagatatcagtaatattctccgcgtcccatgccctttcctcagggagatgccaaggcccaagagctggtccccccaaaaagctgaaggtctttgaaaaaaagtggggactcaggtcccgtgagtggttttgattttcttttcttttgaaagttgcatgtaagtgttttccaaatactatacaagaatgtctataacttaataatggaggaatgttttcgttgttctgtgttggtgagatgctttcctatgcgtttgttgtataagtaagtgagaatggcagaaggaaaggaggggagaggctgatcatcctatcccgtctcccactctgggggtctcggcgcttccagcctgaagcgcgcccgctgcgcgtccggagacgcaggttccaggagccccccggggttgcccgactaggccacttgcgccccggaagagggccgcggaggtgggagaccctaacttacccgggtctgagatgccgagagagccgggtgtggagctgagtgcgcgcctgccgagcgctgaggccacagacagccccgccccggggcggcaccttctaagggcctgagcgctgcacagggatgggggcgggcggggcctcccagagccgccaggcgtcccgccccactccgcccacacgcacggcccagcccagggttccccgggaccaccccagaccagccccggcccccccgggtcctccacactctgcaccccagaccaacaccaacgcgcgtagggaagcgttttagatcctgtcggagaggctcaaggccggcagaaggtttgcattaggatcgagaaagccgaccaacggacagatctacctaccttcctgcgggagtttgaggttgccaggggggaagccactgcagccaggagaaaggccgtctgggaaccaccccaccctcggacgtgcgggccttcaaatatctctgaacataatcctccaaagaccgctcaacctccgctcccgacgactctttctagcctcgtcccgcaccccagctgtggccacacacctattaggcaaacatttatgaagcacccacttactgggtgtgcagccctgagctgggggtgcagctgtggaccagacaggagggggcccggagcggcagacagtcgctggaggcacccgagccttggcgagcacaccctaacgtccttggggcctttcagcccgagccgtccttgtccagagagcaaaccatgcaatgatgcaggtgacttcccagcaaatttcatagcgttgctcaccagcttggcaggcaagaggagaaggggcagtccccaaaagacaatcccatgaaccttctagggaatgacgtccaggctccaggctcctgctctgcaggcgggtcgcagaggcaggttcctgacctaggactagaagacattctctagggtcactgcctccatggtcttccttggcaggtcacttcttcctgggcttcgacctcggtgttctcatggggacgagggtgattggaggccctccaaggggtgcaccgatgtgtcctgtgcaccaggcagaaccagcattgccctacagtgtgggtgcaaaatgaacccacatggccacgttggaaagtcctgaaatgttcatagcctatgacatgaaattgcactgtgtgaaatctatttattctttttttttttttcttttttttctgagacggagtctcaccctgtcgccccggctggagtgcaatggcacgatctcggctcactgcaacctccacctccctggttcaagcgattctcctgcctcagcctcccgagttgctgggattacaggcaccggccaccataccctgctgattttttgttatttttagtagagacggagtttcgccatgttggccaggctggtctcgaactcctgacttcaggtgatccacccgcctcggcctcccaaagtgctgggattacaggtgtgagtcagcgtgcccagactgaaatctatttattctatggaaaggatcagagctgtagaaaaatccttatgcatgtaaaagttctttgtgtttttacttgcaataactagaatctaaacatccaaaaatagaaaatataggtaattaaattgtagtacatatgatattattctacatagtagaatattatgtggagtccttaaaatgtttacaaataatttataacaacatggggccgggcacagtggcttacacctgtaattccagcactttgggaggccaaggtgggtgggtcacctgaggttaggagttcaagaccagcctggccaacatggtgaaacctgtctctactaaaaacacaaaaatttagctgggcgtggtggtgggcacctgtaatcccagctacttgggagtctgaggcaagagattcacttgaacccaggaggcggaggttgcagtgagccaaggtcacgccactgcactccagcctgggcgacaagagtgaagctctgactcaaaacaaacaaacaaacaaaaacccaacaggggagatctttatattatcatgttacgtgaaaaatacaaaaacagaaaacaaaacaaaaaccccacaaaactcaaggccttaaattgtaaatatgagatgccaggcattattcccaaaatctataaggaagcacaccaaccaccatgttaacattgtctattagtggtaggcctattggagatttattatcttatttatgctacttcatgttttccttccttttttgttttgcaacaactctgtattagtctgttctcacactgttataaagaactgcctgaaactgggtaatttataaaggaaaaagtcttaattgattcacagttcagcatggctgaggcctcaggaacttacaatcatggccgaaggggaagcaaacatgtccttctttacatggcagcaggagagagaagtgcagagcaaagtggaaggaaaagccccgtataaaaccatcagatctcgtgagaactcactcattatcatgaaaacagcatggaagaaccgcctccatgatccaatcacttcccacaaagtccctcctgcaacatgtggggattacaatttggattacaattcaagatgagatttgggtggggacacagccaaaccatatcaaactctatgtactttaatatttaaggaaaattacataaactttatctgaaaattccctggattcttctcctcaaggtcatgctgtacatatgcaggatcctcctgcctacatctccaaatggataatggattgaagcaaaatgtttgtcccaccaaacattgatgtgtaacccttttagtaacaattcatagaccaggtaaacatgtgtggagcagcccagatcagctggagggagcattattctcatcagagtgtggaacaatgcctacccatctgtcagctggttatggtgaagacagtataaatggaagcactgtcagaaactaaaggcttatgtaagtgatgctgttcttatgtctcctcttcctctctatcccacatatgatgaattattttattatgatgatgctgtagttgttattttctatttgaaatgaaaagacatgattacagatgagaaagagtgtattttgttatccttgatgcacttgaaatggtttcctcttttttttttcctgttttcttcttcttccttctctcttcactctttcattcttgcctctctccattttataggtatgattgatcttgaaataatgatgataacagaatgatagcccatatagtccttgggtcacttctgtctctatttctctttcttccctcctctttttttcttggtccttttgctagatgggttgcgagcatggctccctgcccctctcagtgggtttatcttcattttccatgagctcccacctcactgcatgtgacatcaaagccaaagctccagccacttctcatcctttcttaggaaaatctcaagtcttaacttgaaagttgaatgtcctgcttttgttcctaactctgctcacaggatagtggaagaagaaaggctcagcctgttaccagaaagaacagatctgcagtgtaacccatctaggatgaagggtcatgtggacagttcttcactcttccctctggctgcccttcagttggtgtccagatgcccctgtgttagcctgggggcattccttgccctttggcccctcttttgttgcctttttttttcttagacaaggtctaactccgctgcccaggctggagtgcagtggtgcgaccattgctcattgcaacctcgaactcctggctcaagacattctccccgctcagcctcgtgagtagctggaactacagttgtacaccaccatgccttggctaatttaaaaagtctttttgtagggatgggagtctcaggctggtcttgaacttctggcctccagtgatcctcctgccttggcctcccaaagttttgggattacaggcgtgagccattgtgccctgccctttgttgctttttcactcctttaccctgtggtttctactatcctcagggacaactctcattgccctggggcttctggatcttcagcaagacacacccctaaaggcaaacaatctttctttagcagcagcagagcacaaacggagtgttgctgtatgctaaaagcatactatttcccccccatgagaaagtctaaggggtccaggggtcctgaagtccctatcctgcccccgccagtgacaggtgatggggaacagaatgctgaaagagaccccacccaaccatctggtgtgtcaacacccgcccctgccggtgctgtccacaggttgatccccatcccacatgggtggcttaacacattcatgtcttctgagagccatttgttgctccccagtctcttctgtcctccttctttgaccaacatttccctgtctgatttgcttggtcacaggtagcctgtgtcagtttcctcccaggactctctttgcctgggaataagtgctatacatgagaagcatccctcccaagcgctgtgtgtggcctcctggcattctcctaagacttcctagaggattgctctggttccaaaaagaaaccagccacaacctgtttggagccctgcaggatgttccagctcaccgacttcattccccactacttgcccctctaacagagcttctagaccagcagccaaggtgcctccattcactgtacatgactcacctttcccccttctagacacttcttcacgggtctagcctctgtttccagctttacacagcacaggctgatgcctgccactgaacgggatccaggactttttcaaatctcagatccccagcaaaggtatgacaatgggcaccctgaccagctctgagcctctaagcatagggtctatttgtttaattttgaattcacttttaagatttaaaaattgagagctctcatcttcaacaaaattcaggggatctagaaacatcatgcccacttgtggcagagtagccaactggcagaaactgatgctgatgctgtctgtttcctacacaaaatgcaaaccagagtttaccacaggccccgctactccacattctcctccacaaggacactcagcaggctcctgtgctgaacggcttgcctggttctgtaggtgtagggtttgttactctgttccaggacctattttccgcaaagccccttacctggctgtttcttcccttggcatacgtgagaactcctttcctcactgaattgctttgaccttgctaattagttgtgttgcaagtgctttttggctgtgtcagacatgtatgttctgtttatcattttagagcaatggttattaatttttttcagattcttcttgggaattagagaaaaacttatggctctcctccaccatcctgcccccacctaccccaatgcacacatgtgcaacatttgttctacaattcaagagctctctagacccctgatatgctaggcaattcgtggctgccacattaggaacccctgatttaggggaaggactgttttctccattagacaaactcaactgtgtagcatcaatttcatgggtctactgtgtactgtgcccaaaaaatgccactgaatgctgcctgactggtggatagcaagactgtccattaatgtggtcatttaggttgcctctgcccaggtcttgaggtcattggcactaattcacaacaccctcaagtcacccagggaagatgagacacagttggctgtagacccacagtttgggcattacagctgcccttgaagttgacaaataaccacaaccttcaaattgttatgaaaagagcacaaatccaattaagaaagcttttccaaaagaaataacagtgttcctaccccctctgtcactctccaccccctttttgtcccagaataatgttgtgctgataggaacatggataaattaattacagtctggaatgttattcatgggtaggaaagaacactaaatctactcgcacaatgtttgatatttaaagataaacattgcctttatgttttttttttaaacctcagtcagcctagtttacgaagacataggtataatccttttaaatgctgtggattttttaatcgcaaaggtaacaatatgctgggtgttttacccagccagagaaccaggagatgcaggaatgagattagcatctctttagttccttgcatatttgatattattttggtgtacctccaattcctgataacatagaagaactcttgtggttgaagtccctgaaatggaaggatattggtaaccctgaatttaaaacaagcacaggcagcctttgtgggaatgtgtgtgaaggtcaccttctagaaacaggactgtccatagccattgccatggtttctgtgtcatttcaaccagaaccttaggcctggaagtctggatggatgtgggttggcatggtcctctatgggcattaaatgaataaatggatatagcagagggagtatccagcatgactcaaagaaggatgagaggaaacatattcaaataaaatctttagaaaagcaaatttcaaaaaaaaatgcttaagtataaaatattttgatgacaaccatgattttcaaattgaattcttattctaagtaatggtctaatctgaacttagacctctttccttaatttttttctcaataagcctttggtgtctagtcagttcaattcagtatttactgagtctctatacagacagggtataaggcattaatcaaatgtatgtccaaaattgcccaccatgcagggcagagctaaaatgcctaacacccctcctctcaccaacacatcccccacccacatctccaaagacttcctggcagaggtgatctctgcctgctgggacagatgtataggctccaacagcagcagggtggcccctctgaccaccaccttgggacccacattgctcttagaactattcctcttttttcatccttgaagcccccagcaaagctcagcctgaatcaactttttctaggaatctgacaagtttccaggctgatttcctgacccagtcagatcctcttccatctttctttgggtgttcaattttctacgtcattttccacctcacatattggccgttgatgaccacatcagctcttctatgctgtaagctcccaaggaacaaattctatcaaatgattggcctttcagctctctactgtgaccagaaagttgcccagtacataaaaaggggttcacaggtatttctcacgtggataactggtgactcatctatccatgattttggggatcccccacttcctggactaattgtaaaccaccttctaccacctgggggtgcctgagcacaacagagctaagtgaacatttcatcagtctaattgaattcagtggaatgttgggggcctggaaatttggactaggaaggtaagcaggaggaataagtgtgaatgacagtatctaaattaaaatctgttgccacgaaagaagatcagaccttttctcctctgatttgtccttctagaagtcacaagatgcccaaagaatcataagcaatgggtaactaggcaagggaattatctctgacaaatgccatgattgctcagtgtcccatttctcttggcagcaagagtggcccaaagactaaactgagatgggggtctgcacccctgcatgggactcaggctctgcagctagccttccaaccactaaacctgagctgaggtacttttagctctttatttcttgtttttctcatttgtcactcagatgagaagaatgcccgctctgtttgactcagtgtcagcgtgatgaagtaaaacagcttctttaaatccctctgcaacaaggcagtgaattgaaaataagaaagatagggaagaacattctgggcaagacagctcaatgagttcatgctttgatcgatctctcagctctgaacacaaagccatgacaggtaggtataaaaatagaaagctaaaaagagatgtctggctcaacagaagcagaagagacactgccagaagcctctgacctactgggctctttgtctaaaatcagcagggagtttggcctctgctgggcaaatccaagacgccccacccaagatggcagacaggaaccaagtacttgcttaaagtcaggaactagggtggggccccgaaagaaagacagtgcctcactgctgcctagggaccaaggttttagaaaaataaggttgaggggccaagatggccgattagctgctgctgcagtccgcggctctcatggagaggaatgaaaacagccagtgaattcagcaccttcaactaaaatatccagattctcggccccactcggactagtcagacaactagacctatggagaatgaagaaaagcaggctgggaaaatggtccacccgagagcggcacggagccaaaggaagccccaccccagcaaagggaagaggtgagtgagtgtgcgacaccacccggaaaaccatgcttctcccatggatcttcgcaacccgcagatcgggagatcccttcatgagcccatgccaccggggccttgggtccgacacacagagctgtgcagagtcgtggcagagcggccactcaggcacacacaaagacccaggaattttacatactccagcccaaggaatcccagcaaggcaggagatccattcatctattcccccaggaagggggctgaacccagggagccaaccagcattgctttgcaggccccgtttacacagcacctcacaggttaaggcccactgtaatttttgccagccagtggtgacagcctggagtcagcctgagatggactgagctctcgtgggtagaggcagccaccatctctgcggttcagttgactcagccattctagcctgccagctccggggagtccagacagtctggacaaggaggagtctcccacaacgtgtagcacaggtgctgtgccagatcgtggccagactgcttctttaagtgggaccccgatccaatcctcctcactgggtggggcctccctgtgggaatttcagcagctccagccagggttatatggaaaatactctgctctctcctgggacggagacccccatgagaaggggtggccgacgtcgctgcagttcagtggactcagtctttccagcctgctggctctggagagttcaggcggtctggaggaagggtcccctcaatgcagcacacccgctacacctgctctaacaaaaagcagccagactgcttctttaagtgggcccctgatcccgttcctcctgactgggtgagacctcccaacaggggtctccagagacctcccacaggagcgatcaggcaggcaacatgtcagtacattcctgggatggagaaaaatgagcaggctgccatcttgctgttttgcagacttcactggtgatacctccgggtatgggaaaaaccaaggcaactagggtctggagcagaccctgagcaaaccacagcagccctgcggaagagtgacctgactgataaaagaaaaacaaacaaacaaacagaaagcaccaccgacaacatcaaccaggaaaaccccattcaaaggtgagcaacctcgaaaatcaaaggttgataagcccacacagatcagaatcaatacaaaaacgctgaaaactcaaaaagccagagtgcctcttctcctccaaatgactgcaacacctttccagcaagggcatggaactaggctgaggctgagatggctgaaatgacagaagtaggcttcagaaggtggctaataatgaacgtcactgagctaaaggagcattttgtaacattaaaaagtggggaaacgacatgaacagacacttctcaaaagaagacattcatgcagccaacaaacaaatgaaaaaaagctcaacatcaccgatcattagagaaatgcaaatgaaaaccaccatcagctaccatctcactcccatcagaatggctattattaaaaagtcaagaaacaacagatgctggtgagattgcagataaaaatgaatgcttttaccctattggtgggaatataaattagttcaaccattatggaggacagtgtggcgatttctcaaagatctagaggcagaaataccatttggcccagcaatccctttactgggtatatatatcattctattatatatacataaaataggaatacaaaacatgctattcctattatatgtgtaataggaatacaaatcattgtattctaaagacatgcatatgttcattgcagcatgattcataatagtaaagacatggaatcaacctaaatgctagactggataaagaaaatgtggtacatatacaccatggaatactatgcagccataaaaaggaaagagattatgtcctttgcagggacaccgatggagctggaagccgttatcctcagcaaactaatgcaggaacagaaaaccaaacactgcatgatctcatttataagtgggagctgaatgacaagaacacatggccacgtgaggggaataacacacactggggcctgtcagggaagggggagagagagcatcaggaagaatagctaatggatgctgggcttaatacctacgtgatgggttgatctgtgcattttgtaaccaaatgtacctgtaatttatgatccaattcaagttgaattttttataaaagataaaggaaagattaggattatgtttttacatagaaatgcacaattgtttcagtacaaactaaagagattttcagaatttcatagatgaaaacaattcacatttgctaaaatgtatcctattaatactaacggttgtacttcagccataagaaaagaggacagaagggaatgtgtgaaagtcagtattaaatggtagtcaattaaaaataaaataaaaattttgaaaggtaaaataataattactgaaactgataaacaatattaataattttaatagccattaaattaacaaaataataataattagatttggaattttttaaagaataagatgagttaaatgggtgaaagtccacagaaagaaagttttctgggtccttgatgtgatcgggaagaaaacagaaatatttaacaacagaaattttgtaggaaattcatagtttactaagtatgctaaaattttatagataattacaaaaaggatataagtaatctataagttgcaaagcaacaaaatatattcttttgtgtaaataaaagggaaaatagaatggtttctcacaccaatgagaaataggagggaaaaatactttaagagaaaaagttgtgaaataaaaatcaaaatgtaacatggtaaaaatatatgcaggtacatcaataatcataatatctttaaatagaataagcacacaaaagactacaatgattacattgaataacaaaataaaatctaattatatgctgcttacaagatatacatttgaagtaaaaccaaattgaaaagttgaaaattaagtaataaaaaaatactaagcaaaggctaacacacagaaatctaaggtagcaatattaacacaagacaaagtaaaaattcaggtgattaatagtatacaaagatcacccaatttaataaaaggaaacagtctgctaggaaaatattacaattatgggtatgtagttaactatacagactcagcaaatataaagcaatcctggcagatttataagacattgatatatctatctatcttatcaattcccttaaggggaactgagttgtagggagccatttaacacacttctctcagcaactggtagatctgccctccccaacatagtaagcatatagaatatttgagtgatgaaattaacaaagttcattaaatatatatatagagagagcactacacccaaccaataaacaatatgcatttttttaacaagtgttcacggaactttttttaccatttggccatgtactagatcatgaaagaagtctcaagaacattttaaatattagttttacatacgtgcttggctctatgatcaaaatgcagttaggttataaatcagcagtaaatttatggtcaataaatcttcacatatctgaaaaccaaaaaccaagtacatgtctacttaacccattggttagagaagaaaacattttagaaacaataaaatactaaatgccatagaaaatactatatatgaaagtttctgggatgcagctaatgtggttcttagaggtaaattgacagcattaaatgaatttttgaaaagaaaaatgatagaaaataagtttaactaaaaaaaggagacatatgaaataaactaaagaaagtagattaaacaaaattttaaaaacaaaaattagcaaaaatgaaaatgaaaaaggagagaagagctactagatgaaaagctactcaaggaacacaatttgaagatttaaataagatatatatttttctagaaaaaaaacatgaacttccaaagtcaatttatgaatagagcttcatcataaaactggaatctataaaaagtatcagttcaatagatggatttactaacatattagacacagctgaagaaattatttatgaattagaatgtaagtcagttaaaaatattcagggtgaaacacaagagaaaaataatgaaaaatacaaaaaaagagtataagagatgtaaggaaaaggattaagagaagtgcagttagaggctgagaagtacagaagaaagtgaacagagcagaagtgatatttgaagagatagggactgagaattttccaaaaactgattttaaaaatgaagccatgggtgaaagaagtatttaaaacttcaagaaaaattactttaaggaaaatcagaatttcttagtgcatcatattaaaatgctgaaaacaaaaaataaagagaaaatcttacaatcagacagaggggaaaaagatatacaggaatcaccaataagatagatactgtatctcatttctcaaaaggaagattgaatactatagaaaattaaatggcatctttaaagtgctgaaagaaaataactacccacctagaattctatacctaatgaaaatgtcctttaaaaatgaaggcaaaataaaggctctaataattcaaggagcgttctgtaatctctaatgttttaactaaaataatgaaagaatgtataaataataatggggaaatatgaaacaaagaaaaatacttcattaatctaaaaagcataagaaataataagtccatagacaagtgtaacaaacagaaacattacagagttggtaaaacttgaggagaaatagatgaatccactattcaacactactttaacagaaacagacagatacagcatgctaaaaatcagtgcgaacatagttgaattcagcagcaccatcaatcaactggatctgattcatctaaaacgtcatccaacaacagcagaatacacattcttctcaagctcatatggaacactcaccaagatagaccacattctgcgtcataaaatacacttggcaaatttagaagaatcaaaatcatcctatgtctgccctcagaccacaatggaatgaaaactagaaatcaatgacagaaagataacaggaaaaatccccaactacttggaggttgaacaatatacctaataacacatgagtcaaagaagaaatctcaaggtaaactttaaaatattttgaactaaatgaaaataaaaatacgtgttgtcaaaatttgtgagatgcagcaaaagcagtgtttagaggaaaagttgtagcattaaatgcatatgttagaaatgaggaaagatctaaaattaacaatcagctttcagcatggaaaactgaagaagaacaacttaagcctaaagcaaatagaaaaaaaaagaaataagaaaaattaattaaaaataggaaataagtgaagaaaatcgacaaagacaaaagctggttctttgaaaacatcaataaaattgacaaacttctagtcaggctaagaacaaaaaacgggagacacaaattaccaacattagatatgaaagagagtcatcactactgatcacatgaacaacaaaatgatcatttaaaaatactgaaaacaacattatgctcacaattttgaagaactttgatgaaatggaccaattctttgaaagacccaaactaccaaaactcacacaaggaaaaatagatctgaataggcccatatttattagataaattgaatcaataattaatagacttccaaaaagaaagcaccaagctaacctggtttccctggtaaattctatctaacacttttaaaataagtgatattaattctctgtagtctctttcagaaaatagaagcagaggaaacacttcctaattcattatatgaggctaacattatcctaataccaagagcagacattacaataaagggaaactacagactaatatctctcatgaatgtggatgcaaaaattcacaacaaaatattaacaaatcaaatacaataatgtacaaaaagaattatacatcacaaatgagtgagatttatttcaggtatggaaggctggtttaacatttgagagtcagttaatggaacccaccacaccaacaggctgaagaaaaaaatcatatgattatatcaattgatgaagaaaaagcatgacaaaatccaaacccattcatgatgaaaactctcagcaaactaggaattcaacttcataaagcacatctacaaaaacctacagctaacatcatccttgatggtgagaaactgaatgttttctccttaagatcaggaattagaccaagatgtccctctcacaactcctattcaacattatactggaagttctagcttgtgttaaaaaacaagaaaaggaaataaaagacatacaagttgggaaggaaaaaataaaactgtctttttcacaaatgacatgattgtctatttagaaaatcccaagaattaactaaaatttcttggaactaataagtgattttattagtttactaagactgccaataacaaaatacaacagactgggtgagttaaatgacttaaatttattttctcatagttttggaggctagaagttcaaggtcagggtgtcagcaggtttgatttctcctgaggcctctctcctcctcttgcagatggccacatttttgctgtgtcctcacatggccttttctctgtgtatgaaaatccctggtgtctctttctgtttgtctcatcttcttagagggacaccagtcagattgaattagggtccaccctagaggccttattttaacttaatcactttttaaagtccacatctccaaatgcagtcacattctagggtactggggattagggtttcaacatatgaaatttgtggagggacaaattcagtccataatagtgattatattatagcaaggttgcagaatacaaggttgatacaggaaagccaatggctttcttatatactatcaatgaacaattaaaaatacaaatttaaaagcacaatatcatttacaatagtaccaaagaaagaaggaaagacattaattctcaggtagaaatctacaaaaacatatacaggatctatatgcagaaaactataaaactctgatgaaagaaatcaaatcaaatgaaaacaaatggagagatatttcatgtccttggattggaagactcaatgttatttaaaagacaattcactgtaacttgatctatagattcaacataatctccccaaattccagcaagctactttgtgcatatcaacaaactgattctgaagtttatataaaaaagcaaaagacataaaatagccaatacagtattgaagaacagagttgaaggctgacactactgacttcaagacttaatataaagctccagcaaggaagacaccacagtactggtgaaagaatagacacttaggtcagtggaacagaatagacaggccagaagaggactctcacaaatatactatagtcaattctctttgataaagaaccaaagacaattcaatggagtaagggcagtgttttcaacaaatggtgcataacaattggacagccacgtataagaaaacaaatctagactcagatcttacacctttcacaaaaactaactgaaatagatcatggatctcaatgtaaaatacaatattttcagatttccagaaaaaaaaaagcagaaaatcaatgtaaccttgaatttagtgatgagttttaaaatacaagccaaaaagcatgattcatgaaaaaaatttataaattatacttgattaaaattaaaatactatgttctgtgaaaaatactgttaagggaatcaaaagacaaggcacagattgggagaaaatatttgcaaaccacctatgtgatacgggaacttgtatccaaaatacacaagaaactcttaaaaaaacaagaaagcaagtaatgcaattttaaagtgggctaaagatctgaagagacagatcaccaaggaagattcatagaatggcagatagaaagatgcccatcataatttacggctgggcacagcagcaccagctcctcagaaggctgaggcaggagggccccttgaaaccaggagtttgaagctattgtaggctatgatgtgcctgtgaacggccactgcactccagactgggcaacatagtgagagctcatctttaaaataaataaacaaatgaataaataattaatttgtcattagagagttccaagttaaaacaatagcaagatgccactacacacctatgagaatggttaaaatccaaaagcctgacaataccaaatgatgacagagaggcagagcaacaggaactcttgctcatcgctggtgggaatgcagaatggtgcagccactttgaaagacagtttggctgcctcttacagaactaaatatagtcttagtacagaatccatctgctgtgctcctagatacttatccaattgatttgaaaacttatgttcgcataaaaaaatctgcatgtaaatgtttaaagcagatttattcataattgccaaaaactggaagcaactaagattctgttcaacagctgaatgaataaacaagttgtggtacatctatatagtggaatacggaatataattctgcaataaaaagaaatgagtattgagctatgaaaagttgtggaggaatcttaaatgcatactgctaagtgaaagaagccagtatgtttatagcagcatgatttatattcctttgggtatatacccagtaaactatgcaaccataaaaatgatgagttcatgtcctttgtagggtcatggatgaagctggaaaccatcattctcggcaaactatcgcaaggacagaaaaacaaacactgcatgttctcactcataggtgggaattgaacaatgagaacacttggacacaggaaggggaacatcacacaccggggcctgttgtggggtggagggggggagggatagcattaggagatatacctaatgtaaatgacgagttaatgggtgcagcacaccaacatggcacatgtatacatatgtaacaaacctgcacgttgtgcacatgtaccctagaacttaaagtgtaataaaatacatatatatatataaagaagccagtatgcaaaggctacatattatatgattccaattacataatagtctggaaaatgcaaaactgtagagactcgaaagtgatcagtgagttccagggttaaggtggagggtagagggtgaataggtgaactgcaggtaatttttagggcagtaagattattgtaatgtaaaattttagggcagtagaattatttaaatggtggatataagatattgcgttgcattgcctatgcaaccaaaggtgaaccttaatgaatgcaaattttgaaaaattatttaagaggttgggggatcccaagagagaatgcagaccatgagaagagaatctaactgtattacaaatataggaaacactctcactgaagggatgggtcggggaggggaagagaagaatactgaagtattttggaaataagtgaggcttataagattaaaggcaaagggaactgcatgtgagcactgtactctagttgaaaaaattgtttcccatagaggtactggttaacaattctgttattgctatgtatttatactggaatggaacaattacatgaatggatggcagatggtagaagccaggtttctcaccactggagtggctgtttatcaaaaagcaggaggagaaagaatcattcatgcagtgatggatttgagttggagagagcagtgtggactcatatttagctcaatagagaggctgatggttatctatagaagtatttatagatatgcatatatacatgatatagtataaacatgtgtgtttcttgctctgtccctgaaacagcctgaaagaaatgacatcccagtaacagcaaacgtgcacagcaccgtatcttggtttctaatactattctccatttaaacgaaccaggattctttggagaagtggctgtttctaagactgggacaggaaatatccaagatgagcctaaagcatctggtagtgccagaaagtaaggaggtgctcaagaacaaaacaggaccaaacaaaacattgatcagggtctgtcaaaggagcacagatgccagctaaaagagttcccaatggccaaagctggaacactttgcggtaataaagtagtattggattataacctacagtataaagtaaatatgcatggtataaatacatggttaaatatattaataaatgaggaagcagagacaaatctctcttacaaaagaattccatatattttacacaggtactctgtcttcaagaagaaggaatcaaactccccattccttcagtgtgagctgtacataatgacttcctcccaaagtgtacaatatagaaaaggggagaaaaagagtaaatttacagtggaggaccctgacaagcgccactcaggcaggcgaccaaggctaccttccgcactcataaatcatgctgacagtaggtacgcttgatatcacgggatgaaaatagcacttcacctctgtgattttctttccaataacttacaaccccagttttctaatgagaaaaatatcaggcaaattccaaaagtgggacattctacaaaatacctaagcagtcctcagaaccctcaatgcatctaaagaaggaaagtcggagaaactgccacagacagcaggtgcctaaagagacatgacaactaaatctaatgtgggattctggaacagaaggaaaagacattaagtaaagactgaaagaacaaaattatgaacttttgttaataacaggtcattatttgtttcattgtaacaaatgtaagatatcgataataggggaaactggatgtgaagtatattgaaagaattgaacaatgaaaacacttggacacaggaaggggaacatcacataaccagggcctgttgttggcgggggggatggggggagggatagcattaggggatacacctaatgtaaatgaagagttaatggatgcagcacaccaacatggcacatgtatacatatataacaaacctgcacattgtgcacatgtaccctagaacttaaagtataataataataaaaaagaaactctctgtgccatcttctcaacgtttctaaaaatctgaaactgctgtagaaaataaaatctattttaaaaaatttaaataagcaaactgctcactactacacaaaaaaagcaaagattagtctcttgagtataaaattgagcagaagaagccagacacagcctgcaagctccaactccattcataaagagtttgcaaactggcagcgatggcgcgagagcttaggaaattgtttcactgggggaagtggaacagacgttgactggatgatgtcacatgaggggcttctggggtactattaacattcgatctcaaatccaattggtggttatatttttgtttccttaaattaataagtattaatttatgaaaattaattgaaatgacactcataatctgtgcacttttctgtacaattcaataaacttaatgataaaaacaagaatgaatcagaactgtgtatatcaacatggatcaatctaaaaagcaatgttgattaaaaaaatttaaaaatatgtccgggtgcagtggctcatgcctgtcatcccatcactttgggaggccgaggtgggcggatcacctgaggtcaagagtttgagaccagcctgaccaacacggtgaaaccccatctctactaaaaattacaaaaattatcatgcctgtaatcccagcactttgggaggccgaggtgggcggatcacctgaggtcaggagtttgagaccagcctgaccaacatggtgaaaccccgtctctattaaaaaatacaaaaattatcatgcctgtaatcctggcactttgggaggccgaggcgggcagagcacgaggtcaggagtttgagaccagcctggccaacatggtgaaaccctgtccctactaaaaatacaaaaattagccaggcgtggtggcatgggcctgtaatcccagctactcaggaggctgaggcaggtgaattgcttgaacccaagaggcagaggttgcagtgagccaagatctcaccattgcacttcagctctgggcaacagagtaagactctgtctcaaaaaaaaaatacaaaaattagccaggcatggtggcgggcgcctgtaatcccagctactcaggaggctgaggcaggagaatcgcttgaacccgggaggcacagattgcagtgagccaagatcgtgccattgcacttcagcctgggtgacagagcaagactccatctcaaaataaataaatgaacaaataaataaacaaagcaatgttgaatgttaaaaaagtaatttgtcaaataataactaaaatagactactttttttatacgtaccttctgtaaaacaaactatgttcttatttatgggcttacaaaatttagcctaagtatcaaaacacacttgagattataaataccaaattcatgatagcagttatctctgcaaagagaggaaagaaaatgaaattgaggagggggactcacttttttttttttttttgagacagagtctcactctattgcccaggctggagtgcggtcgcatgattgcgactcactgcaagctctgcctcccagattcaagtgattctcctgcctcagcctcccgagtagctgagactacaggcgcacaccaccacacctgtattttttgtagagatggagttttgccttgttagccaagctggtctcgaactcctgacctcaggtgatccacctgctttggtctcccaaagtgctgggattataggcatgagccaccatgcctgaccaacttctacctatactgttgcatgtatatatatttaaaaatccaaaaaacatattgcaaaatgttaagttgtgatacagttgggttcagctacaagggtaaccatgacatttctctataactgcttctagttttgaaatacatatatatgtatacacacacacgagtgtgtgctctataagaacatgtaactaatattgtatagtgcaataacagcctaggagaattaacaagcattttgccatcaatacttatcctttgtgttgctgaggatgaatgaacccatagatcattagtctttgaagccgttggcttcttttaaaagtggttctaactcgaagactaatgacctttgcatttcaccagccccaccttgttaatctcatatctttcaagacatgtacactttgggaggccgaggcgggtggatcatgaggtcaggagatcgagaccatcctggctaacaaggtgaaaccccgtctctactaaaaatacaaaaaattagctgggcgcggtggcgggtgcctgtagtcccagctacttgggaggctgaggcaggagaatggcgtgaacccgggaagcggagcttgcagtgagccgagattacgccactgcagtccgcagtccggcctgggtgacagagagagactccgtctcaaaaaaaaaaaaaaaaaaaaaaaagacatgtaatcccaaagtttccttgaagataaattacatttgctgacaggactctttagaaccactgagaacagtcagatattggaggtcaatgaggaaacaaccccactgctgattcactccatagcatgcactgagcacccacatggtccacatgagatgtgatggggcttgaaccagtctggctgtagaggggaaagaaggagagaaacagatctgagaagcattttgaggcagagctgtcagaagtcaccaaatggctctgaataacatggcggagtccaagaggccagaagaagaatcaagaacagccagggccggtttgagcagctgtgtgaaggctggcaccattaactagggtagaaagcatggtggagaaatggggctggctaagcaaagttgcgggttcaatcaagaagtttgcctttggaatgtgtcatggttgagatgcctttcacaatccaagtctaggcctggtgaggtggctcatgcctgtaattccagcacttcgggaggctgagatgagaggatcgcatcagtccaagaatttgagaccagcctgggcatcatagtgggacctcatctctacaaaaaaacatttaaaaattagctggctgtaatggtaaatgcctgtagtcccagctacttgggaggttgaggtgggaggatggcttgagcctgggaggttgaggctgtagcaagctatgattatgccactgcactccagccatggtgacagagcaagacctcatttcaaaaaaaaaaaaaaaaatccaagtctagatgtgaccaggtatgtggaatctggagctcaaagaggagtcagactggaaagatatacacttggatgtcaccagcatattgatgttgcttcatgccatgggacccaatggggcccccccaccctggaggagggtagttagagaagagaggtctgaggatcaagtcctgggatggttagagtttcatagaggagcaggaacataaataataaaggccaaccacataaggaaaacaaaagctatatattcagggtatactgtaacaagggagtcgtcaccatcacttacattttggtagagactccaaggcaagagtgggaaagtttgacagtgatgttaaccaaaaactgacagaggcaggtgtctcaattgatagcggtttatttcgccaaggctgagaatgtgcctgggaaaaactcgagtcacaggaacatctatgacctgtgctttccaaagagggttttgggaattcagtgtcgaaaaggcaaagaacagacaggagggaaaaaagcgagggagggtgggcagtgaggcaaatggtaacattattgtgaggttctgattaacgctcagtaaattggcattttacataaaataaagcaaacacgtgaaaagaggaagtatggggaaaagtcaatgatgcatttatctcagggtggatgaagggatgatttctggtcttgtccttgtcctcttacctgtgaagataaacttgtaattgacattgttagggtgagattgaacagaactcagtttcggggctagcttataggggggatatgtatcctataagatttagggctcacacagaatttccttgtgagcaatttgtgaagaaggccatctggggagatatgtggcctcctatctttgtgggaacctggcttatgtatgacgttatgacacagggttttgaaattacagctatttgagaacaaaagaaaggcagtattgcatgactcagttcccaagcttaactttccctttggcatagtgagtttagggtcctgcgattttgttttctttcacagtggaaaggaagggaaggctgcaggtgcaccctgatgggagtctgttggcatggcgaagccctaggtgagctaattaggggcagggtgtcccatggaattggctagggatgcatatttggttttctctggttggtcctaaaattaaagtgaagacaaaaattaggggagctgtcagttattaatcaagtcctggtcattgtgggccaactgttatggatattattatttaacttcctgaattgttactagagatagcagtccggctttctatgagtctgacttatagcaggctggcttccggttgtttattgtagataaaggggttgggttcctggcaggtagctgcaagctgtgagtcatagttctatttatatatcatgtggccattgtccatttgtatatttagtctcttgggagaaaaaagccgaaaaggagattgaaaggagcagctagagagaggagggaaactaagacaatatcatcatcccagaacttaggaagataaagtcccaacaagaaaggggtggttcactgaagcaaatgctgctaaaatgtctgataagatgaggatgtcaaagtaggtgaagcttttccaggtgaaaaagagacgtagccatcattgttgctgaattctcagacacaggaaacattttcctgtggcttcaggcaatggtgaaataggaactaacagggtcagctaggaagagaaacttttaatgcctctagggggcacagcatatcatacctaacaactgagcagcaaataccgtcccctactctccagacgcattttccagcccaacatgggattcttagattggttagatggcagcatctgagaccacaattaacctgaaatccaagctcaggcacttgcagctccaaagcctcacactcgatgctccgagtttagggacttctatcaagtaaattgggaaatgggtcgttctcctttgaagactgttaggaaagagggacaaaaacggaaaaaaaaaaaaatcaatccctgagtttaatctccagtattccttcccagaaactttaagttagctacaagaatgttaatcatgagcagaaattgtttaataatcaaattatcataaatttgcttttcttttaccttagtaaggtaactatgtgacaaacatttgtgaagttgagaatagataaaagtacccatcatatgatctagccatcccactgttggacatatacccaaaagaaaggaaatcaatatcttgaggagatatctgcacttccatgttttttgcagcactgtttacgatagttaagatttggaagcaacctaagtgtccatcaacagatgaatggataaagaaaatgtgatacatccacacaatgcagtactattcaccccttaaaaagactgagatcctgtcatttacaacaacatggatggacatggaagacatcatgttaagtgaaataagccaggcacagaaagacaaacattgcatgttctcacttatttgtgagatctaaaaatcaaaataattgaacacatggatatagagagtagaaggatagttatcagaggctgggaaagctattcgggggctggtgggtgggtggggagagatggggatggttaatgcatgcaaaaaataactagaaagaatgaagaagacctactgtttgagaacacaacagggtgcctatagtcaataagaagttaattgtacacttaaaataactaaaagagtatacttggattgtttgcgacacaaaggataaatgcttgagggggtgaatacccctttcttatgatgtgcttatttcacattgcatgcttgcatcaaaacatctcaggttctccataaatatatacacctattatgtacaaaaattaaaattatttttaaaaagtgccaagaaactctgtaccctaacatagccctgttagaattacttagcactaatagttgcctttgctgagtgatgcaagcagatgtctctggccctcaaagatgaggagacactgctgctctgcttggtgtgaacataaactccagttcttctgggaactgccttaaagacagcagaaactggagagcagagaaaagtggaaagtggccaggcacggtggctcacacctgtaatcccagtactttggtaggccgaggcaggcagatcatgaggtcaggagttcgagaccagcctgaccaacatggtgaaaccccgtctctactaaaaatacaaacattagccagatgtggtggtaggtgcctctaatcccagctacttgagaggctgaggcaggagaattgcttgaacctggaaggctgaggtcagtgagccgagatcttgccactgcactccagcttgggcaacaagagcaaaactccttttcaaaaaaaaaaaaaagtggaaagcataaccttgcttgatggtgaggttgaatccccaccttcgcctttctcagatttattcccatcttcctactcctccaacccctatgttggctcaagcccagatggctctcacctgcattaacctaaccatctcgtaacccatctcctctctttgttcctttcctatgcaccctccacatggccagctgccagaggatctttcaaaatgactaatcttactattcttctcctctacaaagcttcagaggcttccagtctggactccttaacaacacataaaaaattcctcttctgttcttcctctggctggtggctctcaaccttggctgcacttgaggatcctggggagctttaaaaactgccctgctctggtttagtcagtctgggctgggtcccaggtgtctagagttttagttttgtttcccaggacctggtgactccttgaactatttgcagattcctgaacccctgtcggagagtaagctgtgttctaatctcatcagatctaaggagagatgtaggaacttgccttgaggcttgaattctttctcctactctccacttgtggtagtcagtcttttgcatttaagggtcaaaaataagaaggcctattgtgtttccaaggctggggtccatagtgcatacgataggtttcagagggagagatggcagtggagatggggaaagaaaatgtggaaacctgagtctaggatgttgcttgctaagtgtactagaatatgccaccccaaatatgcctctttggcatataattattttgagctgaaggctattgagaaccagcagatgcacgaaaggtctaaaaacagagtctaagttttccttttgtaaaggattgtagaggtgtctccttctcccaggaagaagactcttaactactcatcagaggagaaagggcagacttaattctgcacaacaaatcttactaaacacctcttgtttaccatccttttcctggttaacttctcataagttgcctcccctacacagaagccccaaccccttcttttttgttttagcctaagatggtatttaacccccagtctaaccacccctttgggttactcacctcttagtgttcctgtgtgtacacagacaacgaacttgtaagtagacttgtttttctcttgttaatcagtctttggccagtctaacttataaggtttcagttggaaaacctaagatgggtagaggaaaagattcccctgcaacacacttatattatgaaaccaaactggataccaagcaaggaggatcgggcatctaacacttaactcctgacctccacaatagcttgcaggtaagggtttttttttttttaatatatatatgtatttttatttaagttctagggtacatgtgcacaatgggcaggtttgttacatatgtatacatgtgccatgttggtgtgctgcacccattaactcgtcattttttttgttttgctttttgttttgttctgttttttttgagacggagtctcgctctgtcgccaaggctggagggcagtggcacaatcttggctcactttaagctccacctcctgggttcaagtgattcttctgcctcagcctcctgaatagctgggacttcaggtgcctgccaccacacccggctaatttttgtatttttagtagagacggggtttaaccatgttggccaggatggtctcaaactcctgacctcaggcaatccacccgcctcggcctcccaaagtgctgtgattataggcataagccactgtgcccggccacaggtaagggttttaaaggcaggaggcagaggttacaggcaaaataagaaatcatggaggttatacattggtttaacctagaaaggtggaacatcttgaagtgggcccacaggtcataggtgaggcaaagctttgtctaaaactgtgggatcagtagaaaagaatgtcagctctggctcatgggtgtgacttcctccaggctccccagggagaaatttagaacaaagaatggcagtcagaattcagtcctcaattcctctttatctgaagtctatgtgtcagtggatccatttggtggatccattggtgggggtccaggtttctgaaacaactctgggacatatgttaatggcacaggacttttttggggtgccacttcaccagccagagacctctgcagctggctgcacccctgcctgggcctcactcagctctgagctggcctctggccttgctccatccagttggcccagcaggctgcacccagctcaccctaccagccaccacaggtgagccaggtgtggagtggcaagtttgcagggtccagttactgtgcacagtcaggtgcatcagctgctgcaatggaatgagcagctccaggtgctggcatccagactaggggaacacagtggcacccaaaaacttggagatgccagcacctgtgaagccccaaagggggtgttacatcatgtcacagcactggctccagaagctctgaggtctagatgtccagaagggttgcagctcttttctccttcccgccactcacagtgcagaaaatgggggtatgttaacagctcattcagtcctgctgccctgctctagcttgtggctcctgggaaggcccggccctgctgccatttcccatcacgtgggacggatgcccagcactggcggagggtgggagggctacagtgttacagcagctacttttgcacccactgtttggtgggtcctgggttcttgtcccatgtccatgaagaatgagattatgctgacaactggagagtgagcaaggcagagaagagctttattgagcaacaaaacagctctcagcagagaggggagctgaaggtaggtagtctcaatgtgtggctgagtctctccagtttttatgggctcagaatgtgggaggtgtcagctatccatagccttggaaaaggcaacacttgattggttaaaaagcattattcagaaagaaccaattgggaaagagcaggcaaatgaaaatagaagttctcattctggtcatggactccatccagaactgacagcctggttttcaggcttcaggctgtctttggcttggaggttgggtttcatgggggacccaccccaatctgcctgggaatttgtctgtctcctgctgctatctttaagatgctatctttggctgggcatggtggcttacgactgtaatctcaatactttgggagactgtggtaggcagattgctcgagcctagtagtttgaccagtgtgggcaacatgacgaaaccctgcctctacaaaaaaaaaaaaaaatacaaaaattaacaagttgtggtggcatgtgcctgtggtcccagctactgacagagctgagatgggaggattgcttgagccctcagatcaaggatgcagtgagtcatgattgcaccactgcactccagcctgggcaacagagtgagaccctgtctcaaaacaaaacaaaatcaaacaaacaaaaaaagatgttatctttagtttttacagggagccaaacatcccatgattctcacttccatgattattgttttaagctactattactctcttgcttatcaagttgttcatttacttctcaggctagctaggtgcctggaatttccctttaagaaactcaagattttttaattcctctgtttggtgctggggagaccaggcccctaagaggggtccctgctccatctcatttgtaagagcttatgagacagccgctccagggctggccagtagctcaggaggaggaagagtcagtggcagggaaagggaggtccagctcgcctgggagataggagctcttccagcactgggctgggaaaccattctctggcagccctgccactcagtggaccctcaacttctccttaatttcctaggcagtataagggtaagtacaagtaaaaagaaattgaattttccctggtgccaaaaggcaaagagaagtccctccctcccttttcttagagtatttcctttataatcctttctctgtctctttgggaggtatataaacctttctgaaagctaaacaagccctttgccactttggcttcccaggaatgtgcttctcgggggcctcggagccatctctttgaaatgtgaacattaagatggatggtgccctgtctcctgtctctctgggagctttgcctaggagtctggctacaagttgtagcatatgagagttttcttcttcctttggatgagtgcaattaacacatatgtaatagattctatctgcctggctatgtaagagggtgatacattttttctgtctttgcaatttctttagtggattgcttttgatgtgtgttgcaatctggtttaatgcatatgtaataataacactttttttcatttcgtatatttttggacaggttttctagattggcagattttattttaaatttccgcaacagcagcaagtcctagcatacctcaacatcatcccaggaacaccccacccttggggaggaaatatgccagagataggaagggccacttctaaatacaagagagtcatcaggcacctgtcaggagggagagtatccagtctctagagatggaaatgtcaacctaaaaggaagaagcaaaggcagaattaatatagagagtttatttgggccaaggttgagagctgcagccatggatgcacttccaagttgccttggggagtgctctggaggacaaagaagagcctcaagtttttaaagaaaaaaggaagaatcatgagagaagcaattacgaaagctgctcatcaggaattttcattagtttacagaaataacattggttagtgattggctatacattgttgcaacttggcattcatctgcagcccacatagcaagtggcttcaagaggtcattattcagttccagggagagtgagacctgattgtggtcacattttaaatgcctttctgggcctgatgatttaaagggctcacattcctcagataaaggttttttttctttctcagattgaagtattctggtgcactcagcctttggacagaaaggagtggagattctcattacatatgggtgcttgccttagttgttttaaatttatgtgcaaccaggctgtttctcccatataaaagcacccctaaacggctgggcgcggtggctcactcctgtaatcccagcactttgggaggctgaggtgggtggatcacaaggtcaggagttcgagaccagcctggccaacatagtgtaaccccgtctctgctaaaaacacacacacacacacacacataaaaattagctgggagtggtggtgggtgcctgtaatcccagctactacggaggctgaggcaggcgaattgcttgaacctgtgaggtggaggttgcagggagccgagactgtgccactgcactccagccagggcaatagtccgagactccatcttaaaaaaaaaaaaaaaaaaaaaaaaaaggcacccctaacaagagccaacagtctctgttgagaccttcctacccttcaagagaacaccaaattggttgatgaacatagtggagaggaacggggatctccatcattgggaccaagagaggctgtgaaacatgataaacgctggtctagaacagtatggagaggcacatgtagtagcgggttcaactagcaaagagaagacagcgtcctttgcaattttatgtgagtccttccaatcagatgaccttacagaggttttaagtttaggttttgttttttttttgaatttgtgatgactttttggagtttggctcaactgtcttgtagaacatccctcattctagctttgtcagacagcttcgtcagggcctccttgacttgtccttctctcctctgtatttcctgtaactggatgtggatctaaaggctgaactgggctcatgagaagaatccttcacaggtgtgatggttaatactgagtgtcaacccgattggattgaaggatacaaagtattgatcctgggtttgtttgtgaggttgttgccaaaggagattaacgtctgagtcagaagggtgggaaaggcagacccactcttaatctgggtgggcaccattagctgctagtgcagctagaatataagcaggcagaaaatgtgaaaagagactgtcccagcctcccagcctacatctttgtctcgtgctggatgcttcctgccctcaaacatcggactacaagttcttcagtttggatctccctgctctcagagactggctctccttgctcctcagcctgcagatagcttattgtgggaccttgtgattatgtgagttaatacttaataaactcatatatatatattcattccattagttctgcccctctagagaaccctaactaatacaacagatggatcccatcaggacacatgatgacagcccatccctgctggcattgctcactttgataatttagggaaggtgacagtcaccgtatctttcatagtaaacgtgcattttccttctcaaaattagtaaatactgtaatttgttgaattatactttgacatcctgttcctcaacaacctttcacccaataaggtttggcatccactgaaggtgcttccctgaatctatttcttctttgagggttgcaataaatgtatatcttttttctacatttattggaggaagtcttccctaaagaagagttctcttttctctctctgttcctttttctttttttttgagtatcactgtgaattcatggatttctttataactcaatgtcaactgccatcattattatttctgatacttaatctcaatttggccggtgggaccctcttcaagctgcctctgctgttcgtttgacatgatcccattagtccgtgatttccttattttctggtacaataaggtgtcctaggctcaacttgtaatttacctgcttttgacttgtaatcagccggttcaatgaggatccctggttccctttcctggggaatggtacttagataccaagttcaaggcatgaggtgtgcccattgctattacaatgttatgacttctaggctctttgactgaaattaattacagacacacacatacatacgtgtacttatgaattcacactgacatttcttgtttttttttatttcaatagtttttggggaactggtcatgtttggttacttggataagttctttagtggtgatttctgatgttttggtgaacctgtcacccaagcagtgtacactgtacccaatgtgtagcctttttttccctcaaccccctcccacccttccccctgagtccccaaagtccattatatcattcttatgcctttgcgtcctcatagcttagctcccacttataagtgagaacatacaatgtttggttttctattcttgagttacttcactttgaataatggtctccaactccatccaggttactgttgctgtgaatgccattattttgttccttcttaaggctgagtggtattccatggtgtatatatgccacattttctttgtccactcattggttgatgggcatttaggctggttccatatttttgtaattgtgaattttgctgctataaacatgcatgtgtaagtgtcttttttgtataatgacttcttttcctctgagtaggtccccagtagtggaactgttggatcaaatggtagttctacttttagtttttaaaggaatttccgcactgttttccatagtggttgcagtagtttgcattcctaccagcagtgtaagtgttccttttcaccacatctatgccaacatctgttatttttttattttttaattatggccattcttgcaggagtaacgtggttctcattgtggtttcgatttgcatttccctgataattagcgatgtcaagctttttttatatgtttattggccatttgtatttcttcttttgagaattgtgtattcatttcctttgcccacttttttgagggtattattttttgttttgttttgttttgttgctgatttgagttccttgtagattctggatattagttctttgttggatgaatagtttatgaagattttctccccctctgtgggttgtctgtttactctgctgattgtttcttttgttgtgcagaagctatttagtttaattaggtcccatatatttatctttgtctttgttacatttgcttttgggttcttggtcatgaacactttgcctaagccaatgtctagaagagttttgccaatgttatcttctagaattgttatggtttcaggtcttagttttaagtctttgatccatcttgagttgatttttgtataaggagacagatgaggatccagtttcattcttttacatgtggcttgccaattatcccagcaccatttgttgaacagggtgtcctttccccactttatgtttttgtttgctttgtcgaagatccataggctgtaaatatttggctttatttctgggttctctattctgttctactggtctacatgactatttttatacaagtaccatgctgttttggtaactatacccttatagtatagtttgaagtcaggtaatatgatacctccagatttgttctttttgcttagtcttgtttcagctatgtgggctctttttttgttccatatgaattttaggatttttttttctagttctgtgaagaatgatgatggtattttgatgggaattgcattgaatttgtagattgcttttggcagtctggtcatttgcacaatattgattctacccatccatcaacatgagatgtgttttcatttgtttgtgttgtctaagatttctttcagcagtgttttgtagttttccttgtagagatctttcacctccttggttaggtatattcctaagtactttattattattattattgcagcttttgtaaaaggggttgagttcttgatttgattctcagcttggtcattgttggtatatagcagtgttactgatttgtgtacattgattttgtattccgaaactttactgaattcatttatcagatctagaagctttctggatgagtctttagggttttctaggtatacaatcatatcactggtgaacagcagtttgacttcctctttattgatttagatgccctttatttctttttcttgtcttactgctctgtctaggacttccagtactatgttgaatagaagtggtgaaagtaggcatccttgtcttgttccaattctcagggggaatgatttcaacttttccctattcagtataatgttggctgtgggtttgtcatagacggcttttattaccttaaggtgtgtcccttctatgccaattttgctgagggttttaatcataaaaagatgctggattttgtcaaatgcttttcctgcatctattgagatgatcacatgattttagtttttaattctgtttatgtgatgtatcacatttattgactcatgtatgttaaaccatccttgcatcccttgtatgaaacccacttgatcatggtgtttatctttatacatgatgatatatctttatatcttaatacactacttgatcatggtgtattatcttttttgatatgctgttggattcggttagctaatattttgttgaggatttttgcacctatgttcatcagggatattggtctgtagtttttctttttgttatgtcctttcctagttttggcattaggatgatactggtttcacagaatgatttaaggatgagtccctctttctctatcttttggaatagtttcagtaagattggtaccaattctttgaatagctgatagaatttagctgtgaatccatctggtcctggacttttttttttgttgggaatttttgtattattgtttttatcttgctacttgttattggtctgttcaaagtttctgtttattcctgatttaatataggagggttgtatatttccaggaatttatccattcttctacattttctagtttgtgtgtgtaaaggtattcatagtagccttgcatgatcttttgtatttctgtggtgtcagttgtaatagcttctgttttgtttctaattgagcttatttggatcttctctctccttttcttggttaatctcgctaatggtctatcaattttgtttatcttttcaaagaatcatcttttttgtttcacttatctttttgttaatgttgttgtttacatttcatttagttctgctatgatctttgttatttcttttcttctgctgggtttgagtttagtttgttcttgtttctctagttccttgagggtgtgaccttagattgtctatttgtgctctttcagacattttcatgtaggcatttaatgctatgaaatttttcttagcactgctttttctgtatcccagaggttcagctcaaatacttttttttttcttttttagatggagtctcactctgtggcccaggctggagtgcagtggctcatctcggctcagtgcaagctccgcctcccaggttcacaccattctcctgcctcagcttcctgagtagctgagactacaggcgcctgccaccactcccgtctaattttttctatttttagtagagacagggtttcaccgtgttagccaggatggtcttgatctcctgacctcgtgatccacccgccttggcctcccaaagtgctgggattacaggagtgagccaccacacctgacccagttcaaatactgtttaaatttctgtcttgatttcatggttgacccaaaggtcattcaggagcagattacttaatttccatgtatttgtgtagttttgagggttccttttggagttcatttccagttttattccacacggtctgaaagggtagttggtataatttcagttttcttaaatttattgagatgttttttgtggcctatcatatggtctatcttggagaatattccatgtgctgacgaaaagaatgtttattctgcagttgttgagtagaatgttctgtaaatatctgttaagtccatttgttctagggtatagtttaagttcattgtttctttgttgacttcctgtcttgatgatccatctagtgctgtcagtggagtattgaaatcccccactattatcatgttgccatctatctaatttcttaggtctggtaataattgttttagaaatttgagagctccagtgttgggtgcatatatatttaggattgtgatattttcctgttgcagcaatccttttatcattatataatgtccccctttgtctttttaaattgttgttgtgttaaagtctgttttgtctgatataagaatagctactcctgcttgcttttggtgtccatttgcatggagtatctgtttccattcctttaccttaagtttatgtgagtccttatgtgtctggtgagtctcttgaagatggcagatacttggttgatggatttttatctattcttccattctgtatcttttaagtggagcatttaagccatttacattcaactttagtgctgagatgtgaggtactgttctattcattgtgctagttgttgcctgaataacttttctgttgttgttgttgtttgttttttctatttgtattgttttataggccctgtgagatttatgctttaaggaagttctatcttggtgtattttgaggtttcgtttaaagatttagaactccttttagcatttcttgtggtgctggcttgggagtggcaaattatctcagcatttatttgtctgaaaaagactttatctctctttcatttatgaagcttaattttcctggatacaaaattcttggttaacaattattttgtttgaggaggctaaagataagaccccaattccttcttgcttatagggtttctgctgagaaatctgctgttaatctgataggttttcctttataggttacttgatgcttttgcctcacagctcttaagagtctttccttcatcttgactttagataatctgatgactacatgcctagatgatgatctatttgcaatgaatttcccaggtattctttgagcttgtttgatatctaggtctctagcaaggccagggaagttttcctcaattgttccctcaaataagttccacacttttagatttctctttttactcaagaacaccaattattcttaggtttggcagtttaacataatcccaaatttcttgggggctttgttcattttttaaattctttttttttcttttttttggtttttatctgattgggttcattcaaaagtcttgccttcgagctctgaagttctttcgtctgcttgttctaatctattgttgacactttccagtgcattttatctttctctaagtgtgtcttccatttccagaaattatgactgttttttctttatgatatctatttatctggagaattttcatccatatcctgtattgtctttttaatttctttaagttcattttcacctttttctggtatctccttgagtagcttaataaccaaccttctgaattctttatctggcaatttagatttcttctgggtttggatgcattgctgggaagctagtgtgatctttcaggggtgttatagaaccttgttttgtcatattaccagaattaattttcagattccttctcatttggtcagctttgagctcaccaaagagaatatttcaatggaaagatctggaactcaagggctgctgttcacattcttttgtcccacaggtgacccttgatgtggtgctctcccccttcccctagggatggggcttcctgggagccagactgcagtaattgtaattgttcttctgggtctagccacccagtggggttaccaggctctgggctggtgctgcggaatgtctgcaaagagtcctgtgacgtgatccattttcaggtctcctagccatagctaccagcacctgctctcgtggaggtggccagggaatgaagtagactctctgagagcctttggttgtagatatctttagtgtgacggctttctcaaatgcttgttatgttaacagtgaagttgtcacatggacagattcaagacctctggttagccaggatgttgcaggcagtggaattagctgttgttttctctttccttgaagcagggttattccgtcatgagttgttgtaatgtcctgagctgcttggcctccagccaagagatggtgctttcaagagaacaccagctgcagtagtagtagagggatctaagcttgcccgaatttggccaggattagtatttgggtttctcaggtgatgggtggggccataaagctccccaaaatttatgtcttttgtgatcaactaccagggcaggtagagaaatatccatcatgtgggggcagagtttggcatgtctgggctcagactctccttgagcaaggcttgccacagccactgtcgggggtgagaatgtggttctcaggccaatggggctatgttccaaggggtattatggctgcgtctgttgcattatataggtcaccagggaagtaggggaaagcaataggcctcacccagctcccacacagttggtggggccgatcttgctccttctgtatcccactaacagcaccaagtttatctctgggcagcttatgctctggactcagaccttgccccaggctataagcttccctgctgagaaagcaagcacagctttcgggccttgcccttccctgtctgcccatcctgttggccacagctttgcactcctatctgtagcagttcccttttgccctccggattctgttcaagagaatttgcacccagttgaaattattacaaagctcacttggaagcttctttcaccctgtggcccctgctaattctactggctgcctctctcaaggacccctgtgagatagagtcagagatggcttccccgggctaaagctggagcatgggaatgtctacaaggctcttcccactgctgcttctacttttatagaaaatattttgtactaaatccatttcagctgtagatacggttaaatccttctcctgtaatctggattttcaggttccccattggggatatgtgcttggaggcaggttttctccctctcacactttgggaatgcacagttttttgcctgtcttgtggaatttgcagcggtgtgccacttctttaaaaggatcagtgaattattttggttttcctggtacgttcctgtggtcgttcttagaacaaaagttcatgctttgtgtctccacatactcctctgtctgtccattcaagtgggagctgaacagtagccctgtctcctatctgtcatcttcctcttaaaacctggcaatttatttttattttttatagagacaaggtctcacaatgttgcccaggttggtcttgaactcctgggctcaagcttcccaaagacaccgatatttataatttaaatttaacattactgaattattatttaactttattttatttaataattgtatctattttccccttcaaaggaaattatgtttcctaaaaacatgtttgtataacatacatatatatacacatacatatgattaatatatatacacacagtactttcttgttctatccaaaaacattcacatagcagtctcaaaatgataataatagctttgttacaaacaataaatccagtaagggcaaagcttatttgtaacactttctgttcccagagagtatccaactaaggctgtgcagcccaagtgccacgtttgacagtttcttaaaatgattctttttgccatgttatcagtttgatatatagttggcctcatttctttgtgtgtacaattttggactgctttctctgatcttttttatttcatttatgttttgcataatgtaaaacacttacatggttcaaaagtcaaaactatttttgaaagtacagagaattctttcttccagccctatccctctacaccattcctacccacttgtatggttaatcatttttattggtttttggcttatctttccagtgtttctttacaataagcaaatatgtatatgtacacacatatataatcttatttttcaaaaaataacaccatatatgcactgtctgtatttggccttttctactaacaatatatcttggatattattccatagtggttaatggcaggcattttttattcttctttcttatggctgcatagcacttcactatgtgactctaccataattcactcaaattcatttcaaccagtttcccattggtggacacctgaaaaactcctatctctcgatatttggttagttgcctcaactgcatgccaacttctgctttggagtggataaggaaggtaagacctttggggacaagactcaagactcagccacttttgtcccaaagctacaggacttgttctgcctgccaatgctgtctctttcttcagcaaaagtgggattaagcgtgtgtataatgccaggtatgaagctgcactgctatgcaagttggacttctcaatcagcataaaagagctgaccattggaaccatccgaaatctcatgaagagggttgagggactctacttatgtacattttacagcagagagtaggaccgggtaagtcaaggttatccactatagtaagttactgctcaaaggaaaactgatagaaaaagggtctccaccttcttaaacacagaagcagtctgcttcaggcagaagatgacaggcaactcttctagtagaacttgaggtatacattcatggctccattgagaatggagatggggtttcaagcatggaagtggggacagtgacccatcagtctgagaagacacttttatgcccacatctcaagcattgctattattttagaagtagatgctcagttgtctgataaagagtatgatatcatccctattggttttaggacctagaaatagatttgcaggaccctaagggcaggatagaggtggatgagaaggtttatagtttttgggtccaagaggtggtggttggttagcgtatgggagaagaaccagcagaacctgagggtgtaagggttgatagacaaaacaaagctctaagtacatgggccccaggccagcgcccagaaacaagcccagacacaagaacccagccccatactatgatctcacccctagcaggcccccattcactctgcagctgaatgtccaggacttctgcaggttaaagaatgacatctgctaatctccagtcaaggtgcacctcagctacactctggactgtagtaacaatgtgcaccattgtctgtatgccctggggaatcactagactccaaggtgggctttgaacttggtgttgtcaccaaccagtgggtggggacctgggagtcccataccttagtgtaggaatgttgatgtcatgggtattggggacagaggagatggactgcattcatgcatgcttttgctgttgtgccagctctctaaaataccttgccttttttggtctatgtatcagagacctttccatctgtcaacaatcaacattagcatcaccttgctaatagagcttttcttgggccccctttggtagaagggtagtctactccttccttttggttcctaatccagtcctgactggattataaggacttcaattcatctctataactagtatttagcactgtgtcaggcacctagctggtactcagtaactgttcagagaatgagtgaataaatgaatgaatgattccaacagatgaaggaactggcctgaaaatgacttgcctatttgccaaattcacccagctttttagtttctcaccttctgacaccaatcaggaataaaagccaaaacctagattggcttttcatcccaagacatgtcctgtcctttatatgggtgtggacttacgttagagcccttgtcattcctaataattccctcttgtgcctacctggatggagctcaccttgggctatgattaggagagcctatctccagcacctgcactcactcacctgactccacctgatgacttgacctatttgttcctccatcagtcaacatgagtgcattggagacttactgtccgttgttctctgtggacacatgtgaagtgcaaagacatgctaaggcaactggcctgagcctgtaattcagccaaggctggtaatgacacatgatcagaggtcacaacactctttttaagtcacagcagtttcccttaagcatggctttagagtctctgagctcaccatgacttctattagagatagcataagcctacagtgctttccctactctttgttctcattcaccactcagcaccacacttttggcaccagatagatggggatttttcccacacgtatcagtaaagcaattctgcagcacacaccaatgaggtgtcctgcaattcaattcaattctgatgctaactacccaaagatgtcatcaaatcccacagggtgagggcttagtcctataagactctccccaaccttgcacaccaattgcaagccctaggatgtgacctgtgcctttgaccaaccagctacaaattgaggttcctacaaccccctccttgggttcaattaatttgttagagcagctcacagaattcagggaaacactttgcttatgtttatcccttatgataagggacattacaaagggtaaaataaacagccagctgaaagggaggcacaggatgaggtatgtgggaagggctgagaagctcccatgccctcctagggaccaccctccaggaagctccacatgttcagctgtccagagctcccaaaactcagcccttttgggtttttatggaagcttcattatataggcatgactgactacatcatgggccattggtgatcagcttaactttcagcctctctccccaccctggagtttggaagtggggctgtaagtcctaaccctctaatcatgccttggtctatggacgaccagttcccatcctgaagttacctagaggactcatccacccattactcattagcatacaaaagacactcatcactctggagacttcaactgtatatcaggaaacatggatgaagaccaaatatgtatttcacaatattatagctgccatcagccatgggtgagtttctcatcattcaaagtttccttcttttttagaaaccacctgttttactctaaacaaagtagattcttatgaaaggtaggctgtttgggggtccagaatttcaacatatgccaccaaacccttttcttccctctgaatttttggaggcgcacctcaccttgtgaatttgtagcaccccaaaccagtaagcacacacattcaaatacatgtacatgcccacagctacccactagtaagcaccatcccccatgtccggtcacacagatgtgagaagatggagaaatgttcacctaaacagctggtgtgtgaagtcctgcctctgtcagctgagctcacatgggaaagatccccagtccctaggccccacatcaatgggcacagggccttcggaggaaaggacaaccactccgtcgtggagggagaacactttggactcgggtgtgtgtttgagggattccagagggtagaggttgaggaagaggagttgggagagtgagaaggtaggatgttgcacaggatgagacccttcctctcaaaccaaacctaatagccaataagtacaggaaaagatccttgacatctctagtgatcagggaaatgcaaatccaaaccccaataagaaaccacttcatactctccagggtggccagaatacaaaaggctgagaacaagtattgggaggatgtggagagatcagaacactcctacgctgctggtggcaatgtaaaacggtacagctgccttggaaaacaggtccccaaatgttaaacacagagctatcacaggactcagcaattccactcctacatatataccctgagagaaatgaaagtacatgtccacatggacacttggacacaaatgtgcatagcagcattattcatagtagccaaaacccaaatgttcatcaactgatgaatgaactgacacaatgtggtctatccagacaatggaatattagtcatgaaaagggatgaagtacttatacttgatataccatggatgaacctcaagtatgttaggctaagtgaaagaagccagtcacaaaagacctcctgttatgtgattcattcatatgaaagtccagaatagggaaatctatagaaacagaaagaagattagtgggaacttagggctcagcttgcgaggtgggggcaggggcaggaagatgggaggtgacagctaaagggtttggagttttgtttggaggtgatgaaaatgttctaaaactgaccgaagtgatggttgcacatatctgtgaatagaccaaaaaccattgatcatacacattaaatgggcgaattgtatacatgcaagttatatctcagttaaggcattaagaactaaacaaaaactaagaacacagatcttctgtctttcctatttatttatttattttgagacagagtcttgctctgtcacccaggctggagtgcaatggcgtgatctcggctcactgcaacctccgcctcctgggttcaagcaattcttctgcctcagcctcccaagtagctgggattacaggcacccgacaccacacccgactaatcttttgtatttttagtagagatggggtttcaccatgttggccaggctggtctggaactcctgacctcaggtgatccacttgcctcggcctcccaaagaactgagattacaggcgcgagccaccacgcctgaccaccttgatcacctttttttttttggaaagcaatgagggagcaacactttgttacctgggaggcgtggaccaaaagagaggcagaggctggagggagagtgtgaggcagggatcaatgggcatcatgccaggcttagggcatccccaaagctgtgggattggggcttgaagcccaggtcttagagacctgagcaggcccagctgacacaggctgcaaacaaatgtcctctcatcctcaccgcaatccctacaagctgctcacctcctgttgccatgtggatgtgtcctgagtggcccacgcagatttctacacttgatcccctcgcttgaaataaaaggagataaagtgagtacaaacacccttatgcattactgtagctcaaacgaggccagactagatcctaaagaagacctggcgtgggccatcttctagagtcatcccacctcccaggacaagcaaaggtcctgcctccaagtcattgcaacttatatgacacagcaaggcaatatagactctgggggaaaaagttttttaactacagtatttttaaaatagaacattattttgaaattacttcgacatctactgtcaggtgacttgtaaaagcgcttgtatgttaaatgctctacattaggagattattttgttcttgagtccctacagagaattccttgggaatgaagtgctattgtgcattcagaattatgtggctatagccatattgcaggccgggaactcaggaatgtcccctctgtcccagctcttcaagttgggccctacagatcccacggggacaagcttttggaaaattgctgggtttctagaccaatcacgtctttgaaatgtcttcttgtcactccgtggtttcttgcttcagcttaaccccactggccccatagatcaggcagctcacaatttgaacacagccagggggcatggaggatgagaaccaatctatcctgacaatcctggcagcacgtggggaaagccaggcccaagtttccatatgtgaacacattacattgtctccaccaagaaaagagcccctgtgaaatattcatgtgcgtcacccactttgccttaggttccattacctaagggacagacctggtgttgctcaacagtgccaggcttagcactgccaggggagatctgcagctacaaagagttaaagaagaaggaattgaattgagttataagcaatacatctaataaatatttattgagtgactatttcattccaagcattctgctaggtgctgagaaatcagaaacaaatacattgaactcattggcaaactagctggggagatgggcagggaagccaactgttgcagtctggtgagagttgtgctggggaatgcagtggctttgcaggagcccggagcagagacatgtagttctgcttggtgggattgagcagatgtcaggcaaagcttcccaaaggacacgatgctcaagaagggtcctgaagaatgatttgaagctggaaagtcagaggaaagcatcgaaggtgaaggcacagaggtaggggacgcatggcacacccagagaactgcagacgccctgtcatgcctgcagtcttcacgggaggtgagaaagaatttccagggtacatggatgcatgttaggaggctgagactggtcttcgaagatgatcagacataggcttgaagacttgatgctttcaaaagctcgctctgacagtagcgtagagaaggaatgggggaagctttgcttataataaagtgagaaatgatgggggctgaattaagagaatggctctgggggtggagtatgagagtatttcctaaagatagaagagagaatggccaggacttgagagtggctgaagtcgggtacagggagacaggagacaccttttatggccatagcttgagtcactgtgtggacaggcgtgctcatcattgagaccaggaagcttggaggggaaaacgctcatatgcaattctgaagttcctaagagacaactggataacacacaaggatgaatgtgaaacaaacaaggggctaggtcccgtaagctcatcagaacttctttctgaaagaagtaaagcacatctctaatgacaacagaaataaccacaaacctgcgagtcagcctcaaatatctttcctgggggattaaatgatggctgagggacggggtaccccagaatgtcccttgcacaggaaaggacctagagaagagagactgttttttgagcaggtcacattcagcttactgcaatgtctttgctttaaacggtcccctgcattataagaatggagtttatatgagaggtgagagggtcccagtgacttagcaaccgtggcatgcttctgcaaacatttcaaagacctctactctggcttttagaatgctttctagagcaagtagcatgcataacgacaccactacctggaattatacactgtctttcttcagaggcacacaaagagcttaacacattaccttagttctaggttagctgctttgtttcatgcatgcttgctggtgtttctggaagaacatttatgaggtgattgctcttgaaagacttcagaacaatcaagatggtttgttgctgttgggttctttttttttttgagacagggtcttgctctgtggtccacgctggagtgcagtggtgcaatctcagctcaacacaaactctgcctcctgggctcaagcaattctcccacctcagcctccagattagctgggactataggtgcatgccaccactcctagcttttttttttttttttctgtagaggcaaggtttcaccatgttgcctaggctggtctccaactcctgggctcaagcaatctgcccgcctcggctttccaaagtgctgggattataggcgtgagccactgcactggctgggttttatattttattttatttatttatttatttagactgagtcttgctctgtcacccaggctggagtgcaatggcgccatctcagctcactgcaaactccacctcctggattcaagcaattctcctgtctcagcttccggagtagctgggattacaggcgcacaccatcacactcggctaatttttgtatttttagtacagacggggttttgccacattggccaggctggtcttgaactcctgacctcaggtgatccaccctcctcggcctcccaaagtgctggaattacaggcatgagccaccgcgcccagactggggttttttaattttcactattattttttaatagaaagcatgcaaaaagagacgacacagtcattggacagtattacaaaaaatagtcatagaagtgaatataaatgatgcaaaatgcaatacagctagagtcccttcttcaccctttttattgatatgttcacccaagtgttctcacacatagaagcaggtggttttctttactacagtagtatagtttggagtgtttatgcttcactaatggtacaaaattagctgagaaaagatttaaattggtgttttaattatccagtgtgataacaaaccacctaaaaatgtagtggtataaaacaactactgtgtattttctcacactactttgtggaggtttaaaaacaccacaaattcatcaccttggtttctgtgggtcaaaacaacccaaattcatcatctcggtttccatgggtcagaactgcaggtacgggttggctggggcctctgctcagggtctcaccaggttgaaatcaaggtgacagccagagctgtggtctcatctgaactaatgcagaactcaccagagcacatgtagtgttggtagaatccatttccttgtggttggaggacggaggtgtcctcttccttgctggctgctggccgggggccatcctcagctcctagaggctgccctcaagtcctggccacatggcaccccagtctcaccttgtggcagctccaggccagcaggggacaccactgctccctccagtgtcctctcagggttcacctgattgagtcaggcccatcaggataatcttccttcttttttttttttaactttttttttgtttttgagacagagtctcgctctgtcacccaggctggagtgtagtggcccagtctcagctcactgcaagctccgcctcccaggttcatgacattctcctgcctcagcctccccagtagctgggactacaggtgcctgccaccatgcctggctaattttttgtaattttagtagagacagggtttcaccacattagccaggatggtctcgatctcctgacctcgtgatccgcccgcctcggcctctcccaaagtgctgggattacaggcgtgagccaccacgcctggcccctttttcaacttttattttaggttcaggagtacatgtgcaggttcattattggggtaaacttgtgtcatgggggtttgttgtacagattatttcgtcacccaggtactaaacctagtacccagtagttatttttttctgatcctctttctcctcccaccctccactctcaagtagccactgtgtctgtcaatcatccttcttgataaactcaaagtcaaacgagtccagatcttacctacatctgcaaaatcaatttttcctataaaggaacgtaatcacagaagcactgtcccacagtagtacgagtgctgagccgttgtaggcagagagggttgtcctgcccacactcaaggggagagagtgcagggccagttcacccctcacgcggaagtggcagtgctgggggctcacttcgtgctctgctcaccacaactccaaactcacaactttattcccaccaatcccatcccctccagtccagggggcacacactccagcaggacttcagctgagcccagggaacgctttgctgactggtgatgagggacctacctcttcacacccatgacacccacccgctgagcccctcaccggggctccgaaggccctggtcaggtcacctctggtctcactttccattctcccctccttcctcccctccagccacagggtccttctcgatgtgcccagacatggtgggtgcacacttgtctgacagcctctcttcttttccctttgcttggaatgctctcttcccagttaccaaagatactcaggctctctccccaatttccttcaggcccttgctccaaaagctccttccgggtgaagcctcccctcccatcctccttaaagcttcagcctctacctgggacacttcctcccccactgcctgcctccttgaaactctccttagtcctcttgcagcccacacagctgaacacaggcaggagggggcgctgctgccctggctggtgtgcagccaccagaggctgaagctcactgacgtctgtctggggcccaggatcaccttccttgattccagctctctcaggctgtcaggacctggcgctgggaggcactaggccatgccctggcctgaggccttctctctccctctttgccctgtgtctctgcagggaagcccggccctgcccctgggagggtgggggcagacgtgtggagagtgggtgtacaaggccagggtttgccaggcccaggacagcctggcacctgtcaatggatgagcgcctctcccttagcctgatgtcagggtgggcatgagggtgggagcagagggtgcctaactgaggaaagggtctgtgcaacccccttctcctaccagttctcgtttctgaagtctcctcaagcacactgcggtgtccacaccattggcagcaggctccttctcttcaggtggtcttaggaacttctcagaactttttgagttatccttctggtctcttcctcctgagcacggttctcctggttgagctccaggccatgccattcaacgccctccaggacaggccgaagggcttgtctgtttggtggttgctaaggtttgaaaaaagccagctggaaacttaatccccaaagcaacagtgttgggaggtgggacctaatgggaggtgtttagtcatgagggctccacccttatgaatggattctctctctcttgttctctctctctctcttcccgccccgcccacccctccttccccaaccttgtgataccttccaccatgtcatggcaagaaggcccttgccagatgtggcccctccatcctgggttcccagtctccagaaccatgagccaaatgcatttctgtctgttacaaattatgtacggtgtggttttctgtgatgaacacagtgctgtaccagggccctcttgccaagacagccagcttataggagcctgcatgtgaggcccggacgtcctacagagcagcagttagaggtctggccttctggataggcactgccctgccctgcacacaggaccttggtggggcatgatggggctcttcaccacgctgccctcattttaggaggtgggcaaccctttctcccccttctccatgtgcttctgcagttggaagaagtgaggggggttcagacacacttaagctgagcttagagcaaagcatgtccctcaaggtgaccttgccgcatggcctgaacctagaattcccctgaccagggtggacagccatcaccatgggcctttctgcctggcctagtatggctctccttcgaactcacctagacccttgcatcaaaggactcggggactctgctgcagtcatcctagcacggtcgagaggagtaggaaggtgcccagcggctcagcctttaaggaggtctattggtcaccattgcttctgccttcttgagaaccatcaccctcggaggatccggtagtgtatcccagtcaagtgtcaaatgcgttgttccctggagaggaaggcttatttccagaaagtactctgacgttttgtaatttgtgatttctatcactggctcagtggcctacccactgctcagctcatgtggcatgaccaggctggggcgtcgggtcatcttgttctctgggtgtgtggcaacactggtttatggcgtaatttccttcctgagaagaaattcagtaatttctaatattcagggctttaggtagaggcctgaaaatcactctccatgcctctttcagtattttatatatagttgtctcttggtatccatggggtttggttccagaatcccctgcagataccaaaatttgcgaatgttcaagtcctttatatatagtggcatagtatttgcatataacctatgcatatcagccaatcatagatggtgatttaaatcatctcttgattacttctaacacctaatactatgtaaatgctttgtaagtagttgttacctggcatttttttatttgttttatttttgttgttgtttcattaattttattttatttttggaatattttcagtccattgttggttgaatccacagatgcagaagccttagacacagagggccgaccacacctatgtatgctgttcttaaagtagcaacatatttgttctgaacatagaagaaattagtcgtctattagactttaagggagtaaatatggtccaagttgatttttaaatttagcaaatagtcatagacatatcagtgtcttacagaaaatatttattggaatgctcactctctcatttgggatactgctttgccttgctgtgtcttaagaatgtcatcagagcatcacacacttgaaaaacgtttttaaaaggatatgatgataattaagaccttctccccaacccctgcccattatccaagatcaatgtttttttcctttatcctgattttaaaatcaagtacactttattgaggcatactttacatgaagcaaaatgtaccctttctaaatatgataagtttgatgagttttcaacagatgtatacagctgttaccatgactgtgtctttacccaggttcttgcattgctcaatccagatacagaatgtctccatcaccctgacaagttcctttgtgccgcaccctctagccaatcatctgttttgaggagagttttaaaacaaaggtttttgttctttttcactgatgaccataacctaccacagacagggtctctctctctctctctctctctttttccctgttcttgcgccagctgcctgacaatttgtgggattaaagctctaagctgcttactggctcttctgactagggagagggagcaagcctcattatttttctattcttttcagtgactgctcactcctcttcctccaaaatccctatccatccatccatccatccatccatccatccatccatccatccatccaactttccatctacccatctatccttccatctatccaatccacttgcgtgttgaacgtctactatgagccattggctaccaggaatcccacttccacccaaattatgtttcaacagggaagacaaacaatttaacaattacgataaaaaagaaaatatgccatacaatggaaaagaagggggcatgatgggagacccagcgggagtagctggcaacgattcttagggggaagagacattcctaatagacacctgcaggagaaatattaaagagtcaatcatttcagtagcgcttattgtgaccaataatgcaagaagtttctgggttcccaggctgatgggtttgaaagtcactgcatcatgaatgtgcccaggacccacacgttgttttgtaagagaggggttcagtaaaatgtgaaatgaccgacattcaacaggcagaactgtgcagaatgcacgctttgccactgattgaaagtgtttcttcagtaggttttgatagaatatattactaatctggtaagaaacagcttagggccactcaagaaaagaaaagcagcccctagaaacatgttctgtggctgggcacagaggtagctgctggaatttgaacaggggtgagcaggacctcgtggacctcattgtggggttagcagggctgggctgggacaatgagatcattttctaggcagagaaaagacaacatggtaagttaaaaacactgaaaagtctgcgctgccagagtacaaatgtcagccaggagggccctgacactcttgaaagagggatttgagcagtggccactgcatctacttggcactcgttcgctgtgtagaagggtcaccgagtccctcatcagaatcctgaaagaaggagaaacggtgggcacaggcagcacacctcaatcacttgtgaataatttccttctgtctttcataaacatagctatgattgaaatgacctttcacgaacagcagggaaggattgtggaagaaaatgaggtatgtgagaagcaaatccatctacctgattgccatgtaactttcggtgagtcacggagtgagaatttcagatgtgaattaaggattgccaagagtggtgatatacttgaaaagtttcctccacgttctactccctgttctactttagaatcaggaggccagagaggcaggagggaagagtacttgttattcatagtggaccttcttcctgaataatttttagggtaattatgtatgcagcttccacctgagtcactgacctttgggtgaatgttactggatatgtacctatgatacccaggcaaactttctgcgggttctacgggcactgtgaagtgtgacagactttggctgcgcgttcacttttgatcataacacgtccatagagtgcttttaatctcctgcaacttaacatatgagaaaatcgatttattttgtagtgagttctgcacatttcacagaaaattaaagctctctgaaaacccaaatcttctgtgggcagtaattcacacacaatattctggaaatgtaaaatcccaaatgcctgctgacttcaaatcaatgtttatagcttgtgtctgaatagctccatgaattgctccgctcctctccttctactgcccttcgctttgatttagccactcatttccaggggctgattttctttttttgcatggccctaagctgtttcccatcagattagtaacatattctatcaaagcctattgaagaaacactttcaatcaatggcaaagtgtgcatcctgcatgatgctgcctgttgaatgtcggttgtttcacatttgactgaacccctctcctacaaagcaatgcgtgggtcctgggcacattcatgattcaattactttcaggcccatcagcctgggaaccagaaactttgtgcattattggttttacaatttcagctgaggcttccacagaacaactcagaagaaataggctgtcctgagtgagccttttccttgacttgtattttctattctaaggtctattggcttcactggcagtgggaccactgactttttccctcctttatctaaggggacctgttgagagtctctatttggaaatatttcctgcctgtccttagtgggggtcaatgcctgaatctgtccaataatcagatttgaccaacttggtggaagtgtggattttccagcacgattaaaccttgaacatatatggcttgaaaatgtgcaaatactcttggaaatgacaggatcatggttctcaagacagagaaaaaaaagtagcatgtgaattttcatagataaacgcctaatgctaatgttgatcaggattaatgtcatttcctagatttcagcaaataaacactgggttacttaggcctttgtgggcttcccaggaaggtcaccaccatttgaaatgagactttcaggggaaaagctgccagagattaaacagaaggcttacagatgcatcttctgaagataacttagtatcttccatggacatcttttctaatagaaaagaaagctcttcaaatgaccaaaaccattgctgttttgtggaggtgctggtgaacaggggtttcatcacagtagcatctacctgtacaaacgaaatactcgaagttctgatttcagttttatccattttcttcttttgcaagtgatgcattcttagtgtggtggactctccatgaaccacagcacagaattaggagtttctaagctcaaattgacaaaggatgtctccttctgaatttaaaatgtttaaaaaggtttaaaagccttttaaactgcagaatttagaaggttcacagatttattctagaaataaaatgacaacttttctgtaaggagcatactgtgcccatttattatagaatgcagttaaaaaaaatattttgaggttagcctctccagtttaaaagcacttaacaagaaacacttggacagcgatgcaatggtctctcccaaaccggctccctcttaccaagtaccgtaaacagggtttgagaacgttcaatcaatttcttgatatgaacaatcaaagcatttaatgcaaacatatttgcttctcaaagaataaaaccatcttccaaatttccaaagcatgcattgttacttggcattaagtatttcaaaatgacaaacattgttacggtattgtaaggccaaaatataatacctatttaccagacatacacattacaactagaaaaaaattacaaatgttaacctagtataacaattccatcaggaatgaatggggaaaggcactgcatccctctcatatcgccacagatctactatccacttgacatgctttgaattcaagtcctgttagacatgggaacagcttttcctacaacatatgattcacaggtaggttaatacatcttagtctcccactgccatacttttcacccaagtgtacaacaggtatgaatatatgctatcagctttatttacaagtgtatcttgatgtcttcgtggggtaaaagaaccaactatctcaaccaacagtttccaaaaaagtttttggctatgattcatgtatagaaaccaccacataaaagaaacaacagaaactgaggtccgatcccaaacacctaaactaaaatttctcacccactaaaagttggcagtgaaactgctattctctgaattgtataagctaaattctacagaggaatttcagatcaacttcttttgcaaaagcacaagttacacgttgcacggttggggatgctgagtgaatgcattccaggaagagttccgcaagcaagtgctgttgcaaagagtcgagaatccgagaatctgggaaaggtgatacgttttccaaacgctttcctggcttcccaaaagatgtaaaacaacaacggtgtaactttatatacgaacaaaggttagtcttgtaaatcagtaatatacatgcacaaacatgagaacatgagggaagaaaggaaacgctacaatttccacattgcattgctgctgttttcacaacctctctgcactaggcggcttcctgtggtacctcttcctaccagtagagagtggcccctgcaggccacttagaaacaggaagctctctcctgagctcactgatcaacctgcccttggcacagacagaacctaccagaaaagaacaagtacaaaacactatcattatctgttttctcaagacagtcccaaatgtccttgtgcgatcaccacaaactcagtgattggcccaagtcattcccgggtgccatgaacagtaactggtgtgcagcattagaacaaggggacacggccttgattctcttctgagcaacatgaactgggatttctgccaccccgatctcggctgccacctccgaagaagtcgtgaccagccacctccacagtaaaagattcctcccgtgagtatgatttggaatgcgtcctcgtcgcgtgccagttcagctgaggtggatcggcgtgtactccggcctcctggtctggataatttttggcttaggtctcctcattctttccatttcctcttcttcctccttctcttgatcactctcacatacatggaccaccacgctgggagtggtgtcagtcgctgcgtgcaattcatacttttcccctaaggagggaaaataatcgcagggtcactcagacaagtccttgggagtcaaaaggcaaacataaaagagcattcagggctctgctgggccagctgctcgtgaccattcgattgggctgagagacacagccagacatattttgggtttgtatttctttgctagctcattcagaaaaagagagatttccattgtgcatgactctgtttttagtcaaacattctgggagtccaggcacatgagaagtatagaaggaatgcatttttctagttatacttcacatgtccaccagatatctaaactacccagagaactccctttctgtcagcatttcctcaagtgtgaatgtgagaaacttcggttcaggaaaaagatggatgaagaaacgtatttggaaacagaaccctgggcctccctcatgcagctcctatttgagggtcgcagtgcacgcccaggaagggcgccacaggaggccctgcagcagacgcaggggtggctgcacggagccaggtgctctggaaacgtttttgacctgggcatcttttccttagaacaacttctaatccccgggaccaggagtgtcctgctgttctatgtcagcctgagttctaccaggttggccaagttcaggccactctggtccagcaagggtggggagagctttctgcaactgaaaaacccggcaatgtagaatgaagggactggggcctcccgctggggtgccgctctggccacgggaagagtgtgcatctctggtgctcatgaaggcagctctgagcctggctccttagtacccagggctcatgggcactttattctgcttccctgtgcacctcagttccctcctcagtaaaggagacggtaaaggtattgacttcatggagctaacagcatgagtgagtgcccgaggcaatgagaacccggctcaccacatgcttgtccagcccatgtcacctagaaagatgtttaagaatggagactgcatcgttattggtgccctgctgggcagggatctgaaataggggcaggaggtttgcttcaacctgctccacccacagggtgtggcctcatggtcagttttcttccagggctttgtgcttgggatttcttttcttttcttttttctttttctttctttctttcttttttttttttttttttttgagacagagtcttgcctgttgcccaggctggaatgcagtgacaagatctcggctcagtgcaacctccgcctcccaggttcaagtgattctcctgcctcagcctcccaagtagctgggactacaggcgcatgccatcatactcagctaatttttgtatttttagtagagacgaggtttcaccatgttggccaggatggtcttgatctcctgacctcgtgatccgcctgcctcagccttccaaagtgctgggattacaggcatgagccaccgcgcccggcctgtgcttgggatttctttgcagttcgggtaagcgaggaggcaccgcaccaaccactgtgtgatttccgcccgacaagagcggcccaggagagcttcctacctccagccacactggttactcctctaaacctggaaggtacttttactgataaggaaggtggtgatcttttctctatcacatgtgggactggaatgttattataactgcactgaaaaaggcaaaggagctcagctctctgagagagagaattcaggcatgggaggtcagatggattgctgaaaatgctggttaagagcctcttacaaatctacctctttgcaagtctcttatctacctactaatcatcgaaaatccagaaagctcagggtttaggaccataatttgcaaaatctccgcaatcctgttggttgaaaagcacaggtgaaatatgaaatctcactcaagctcactgttaagtgaaccaaggacaaactgattttattacgtctatttcctaaaaagccttctccaataagccctcggtgaaggaagtggtatattctggagtatgcagaatttttattaacagcatttgcctctggaactgtggacacctctttgcaagtggagaccctgttttctcccattcctaacctaggggaagactccacaccctcagccatgctcatgcccccgggccaggagctgctgtggggggagcacacgcttcctcaaaatggccatttctgatcttgaccttcacgccacaattagcagtaagtaatgtgagtcttgctttatcccacagagggaatttccgtttggacaatgttttcagaaatgtaatcttttcaatatgaaactgctgatggaccaagaaaacaaaaccctcaacccaagggaacatcagattgctggtcaaggagaaatgaggagctgacggtctcagcatttatttgacttgctccacggacagagcaggagaaggctcaaacctcttcaccccaagactctccctcacacctgcctcctcacccaaaccctagaggacaggacaggaaccaccaacattttatggttttcaaaaatcctgcattgaacactgactgtgagccaggtgctgatggaagtgcctttcactcgatgatctcatctactgctcacaattccaccagttaaggcccacattttggacaaagagcctgaggaacctaccccctccccgcagtgctcacacttttgtccctccagaggacgggaacttcctctttctttagcaagctctgtaggggaccagcccacaggccctggggtagggcagcccgaccgcggcccttccctcaccatggcctatggttctccttcccttttcctttaagaaggccaggtgagaatcacaggaaagggagaatttattttgattaaaaataacatttcttaaagggggcatcgattttccctttccaaagtccaatcactcatccctatccggagcgacagaacctggggccggggctcaggcctcccacgcaggctgtgctcagtggacacaggaatggattcctgggacactgcggggggtggaggggcgtgatgcagggtccccacgatcagccgcagtctctctaacactgcaggtggtgccaagaggcaggcatgctcccagcacaagggacggtggcgcagaagaatacagagaagctcacaaaacatgccggcatgggctcaggagagctacgggggtagtggtggtactgctccctggtgcagggcagcagctgtgtctccccctgcctccctcccacccgagggccctgctcacctggccccagcttggagatggcatataagagatcatagtttatgactggggtcgcatcttccacttgtttccatcccactggcggagaggcgggaggggagatcagaaactgcttgtctggatttggcggagccaggtgtgagcttcctatgtgtaaggtctgaggagagaaaataagcacaggtcagttgttgccagggaagaactgcagtgaggcaacagcacctaacgccagttccgggagatgggcaggtcaatgtccaggcgtcaggacaggtgtgattccaggaccaattgtaagatggtctgtaatggggagggcaaaaggacatatgaactctggttgtggcacagataggatgacagccccctcccagggctatgggagtcacaggcacagggactgcaaataattacgcttgacctagatggacagaaaatcagcagaggtgactttagtatatatggaaatttaagtcactgtcattgaggtcaggagggctcttggaatcagtctctccccgctcctcataccacagaggcaagctctgaaagtccaaagcctaggccacagttctgagaggacacagcttctcagggacagggagccagggctccacctgcccctagggttccccacccagcagcagctctgcacctccctctccgggactctggatcagatgccagaaaaaaaaaaaaaagccacttcccaggagactttaagaaataagaataaggaacaataacctacgatcctagtttggttttagaaatgctgaccagtgatgagagggctgtccatagagctcttacatctcaagctgcgcggtgtaggttttctctgcacttccagattgccctccccaagttttcacaatgaatatgcattgttttacaaacagaaaaggtcagaggagtactaagtaattatttgcataaaatcttatcccgtgcagaaaggagtgtactcacacaggaaggcctaggcacccaaggtcaaagctcagcctgtgcctcccagggcaaaaaggtcaggggtggggcggggatcccaaatgctttatttatacttgaagggcccagcaagttcgctgtcctcactttgaggaagaaaagacactttggctctctggcgtggtgtcagatgagcttcctcccactgggggaggcctttggacagggtcctctcccatcccagcaaggtatgtgtgtatgtgtgtgtgtggtgggggcgggttgggggggtgctcagagcctgagggggacttgctttactgaggagctggctgcattctagaagctcctctcttcttccctgacaatctgtcagcccctaaggacatcaaatggaactctgggagctgccttgaaggtgggtcacctgtcctaagttccccagaggagggtcaaaatggtagtgggcaggagaaaaggcaagcccaaccccagctacccctctccctgccgtgggtgccctggggctgggaaccctgccaaccagagggtttcttagcatctgcgcccagtctggttatcccctattttcctttcaagccagacctggcagtcctgggctgatttgcaggcatcttctgcagactcctgtttctctgctgagtacccccagcaccacatgagcagggaaccactctggtctgctcagtctagagtgggtcatgagctccaacccttgagcaaattcatggaaacctgctgcgcaaaccttagggtgtttgcatagccacgcctaccccgctgcaccctgcaagctccccagtgaacagggaaggctttctttcccccatcattatcaacccaggaaggtcaggggcaatgtctgaggttgctttcaaatgcaccttgatatcttcttaaaacaagtgagacgctgaacattcagagtaggaattttgtctttctcaaggtgaagtctcagagtttccggtcagcatataacataagcaacgtataagctgctttacaaaagggagggagggaggagggagaagcatgcatagcaatgaacccaactcacctgagcaaaatataacttcatttcctttcccagaaactcagtcttatgcagctggagcctggcatctgctgcggagaaggggttgctgaagtttattctgactcgtttgaagctcttaaaatactgaaaggtgatgtccttgtcatacgtcctaaagagggactcaaatttggcctgaaaaataacaataaaaataaaaggagttgaaatttacctgcatatgacccttgactagatgatgtcattacttttttttttttcttcgagacagagtcttgctctgtcacccaggctggagtgcagtggtgcagttttggctcactgcaacctccacctcccaggttcaagtgattctcctgcctcagcctcccgagtagctggggttacaggtgcctgccagcacacctggctaatttttgtatttttagtagagacggggctttgccatgttggcaaggctggtctcaagctcctgtcctcaggtgatccctcggcctcccaaagtgctgggattacaggcatgagccaccgtgcctggcctcctcaatacattttttactgaggaagtggatcatcaatcctttcaagaactcctaacttctttcttagagaaaagcctttcccctcttaggggactatggcctttagtcccaatgcaggtgattttacaagaaggtaagaaggtatgatttattacattcatcgaatcagcagaacagttgccaatacatagacactacttacggtaacaaacttttttaaaaagtagaatgagcattttccagggaggtacagtttggtaatttgctccccatgtttctctgtcctatggccttcccccactcacccccccttttttctctgtcctatagccttccccggctagccaactccaaccccaccgttcagctcagggcagtgttgcatatatcaaagatttctttaaggcttaaaagaactgcagctaatttgaaaaaaagaaatactgacttgaaaaataacaaagttggtagaaagttttgcatttcttaaaataagtagtttttaaaaatttccacgatcgcttttatctcagtctgttactttttaactctctaaaatgatactggtttaaaaattaatgttctgcaaatggaccattttctgcatcctggctttcgtgtctgtgcacacctcgctctggtgccatagggctagtgagaattaggagatgtcctgagctcttagaatgcaaagctcgaggtgggggattacaagcttaggttgctcaggggacagccccctaggctgggtcctggagtgtggctgtcggtgggggcagctgggggccactgcaactcctcagagagggagtttaactggtggacagtcaaagctccaaggaagactgcatgggcttctagtcgccgggttttgtgaatctttttaccaggcaaaaacacttaggacagtttgtgggagcccgtgtgaaaggcagaaggggctggccaggaagaaggggatggcgcagggtgtggatggtaggcagcgcggacagagctcactgaggaccttggagaacctatggaaggcgcagtgtctctgcagtgggagcgaggattcaggataagagaggagagtgtcttcaggaatgttcactgctagcaagcgcggggaggcactggtggatgcctgctccacatggggctgcgggtaggagcagggtagtcggtccctgccaggcaggtcgttaaggagcagtcggaacaacctacgaccttgctctccttgcattccccggcttttcttcagtttagggacatttctgagactttcccacgagggatcccgcagaggcacgtgcgaaggaacgcggagctggcggacggtagagttcatctggccgcctctcactctttttccccacctctcttgagcacgggcaagtttctggcaaaagtgtgtcttcgtacatttggaattttgtatgacctcatcaataggcactgtgacccactgtttagttttgaagttatgattcagaatttgggagagatgactttgaagaatatttttagaatacaggttcagggcttaggaccagaacaaaagagaattcacattatctttaaaatctagattactatgatgcctttctcttataaaagaatcttatttgttctaataactgatacctagttattatagcttttggatggcatctctacttcatttaaaaaatagtgattttactcacataaggctcatgttaagtgaactcactttgtagtactttaaaaacatagaatgtgctctgcaatctagtccaaacactatggtgcgagcccataagcattatatacaattatggagttacatttgattttttttaaaaaaagaaaccttcgcatgtcccaatatggctttggatataaagcatataacaccaccaggcacaaataccacccctcaaatagagcatacaggattcattcctatacagtattattaaagctcaattagccggatagctgctgatgaaaaaacttacattttaatcaaatgaagaagaaaagtgtagtgattaaaatgattatattaatcaccatcaaagagagctgctgcccaggaggcacactgatctcacacttaatttctccagttttattatttgctctggcggcattttctcttgttagagaaatctgggagcttgaggccaggccctcataattactacaaacatacaaatatctttataacatttatttcctaagacgaaatgaaattattcacaacgctggctacaaaagtaaaacactattcactgtcagaagaggcctctttctgaaaagttcacttacaacatacacagaatgaaaaacacacgatgccccaactctcgccttcctagtgagttggttcaggggcctggatgttgtcaaatattgagatctttagaaattccttcctcagttaattcctcaggcaacagcttttgattttcaaggctcgaaagactttggatttctttcaaaacccccaaacccacaagagagccacattctcccaagtattcagttaatagtcccagttagcataatgctttgaaaactaaagaaaatcacgttatattagaagccttaccctggtttcactttcgctgaagatatcactgtttgccacacaggcaatcagggagctaaaactgtagttaaagtttctaaaatgcatcttgctttcttacagtgaaagcgctacagacccacgcagtcaagcccctagtgagattcctttccaagaggctgtaggttccttcttgagctggtgcttataaagcagtaagggccagcccccactccctggggaaaaaaaaagtgcagcttccacagcatcctgtttggacagcaaattcctgagtcaagtcctgcatgcttgcaggcagacagggacaaagtgtaagtttctactggaaagaggtgacgtcaacaccttagtcattttccctatgctaattaactttgcttggggagaatggaaaaaacagctgaggtttgcttcacagctgctttatcaacctctcttgcagcatagtttccactggtagtaattccattcagctactcagacaacacgctcctcggccgaatgggacgacccttcttaagatggaaaatgttacaaaagaaaaaggatgaaggtctgtggcaataaacagcaattagactgtagggaaatttcaaggctttgggaaacctggaaaccaaagtccgggtgacatacttgatccctggaatttcctgaaaacctcaatcaaagtttcactttggggtattagagaaaacattttgaaatctgtcttggtcaataaaaattttaaaggacaaaaagaggaatcattttgaagtgtagttaaaatttttttccccagtgacattttattggatgaatgtcccaatttctacttgtatcccacagtggaatggagcaaacagaacctaaaacaatcctaggattttcatttgaaaacttcattattataatttgagaactggggatatgaaacacttcgatcattttcaaagcactactgaattcaggcaaaggatacaaaaacactagcctttgaaactgagcaatctagcctttgaaactgagcaaagaagcattaacccatttatgccagaggttgcaattttttgaatttttgccatcagaccttggcaatgaccttgagcaataggatataaataactcccacatgcttagcgttccaataatggaacactaggcataaatgggttaagaggtcctgcttaaagactcataaactaaatgtaaaaaaaaaaaaaaaaaggaaaggaagaagaaatggaaagaatgtacactataattgaaagggaagatgcagggaagatgcctggtttggagaagtgctctgcgatgcaagactgactctagttctttcaaaaggttgcaactcttgaaccttctaagtattttaccagtttagatccctatggcagcctgggtcctatgttcttctcactctctccaattttattatcacctaaaagcactcaagttatttaagcattctctgatttaggggcacacagggacagctctcaagcttccagaagttaaatggaatcctgccattcacatttaaaaattaacttcaaagaatcattaaagtcagccaataatttaaaatacatgcaagaggaagaaacaaagcagggcatttagccttccaaaaaaggaaaagcaaagtccttttggatgagtgagtgttgcttaatttcaacgcactgtgccttgctgccaactgtagagttatgtaagaaaccagttatggtgtttgctttgccaaattatccataactcccaacctgaaaagacataaacgcatgtattccaaaaaagtgtagaatactgaacaatgcaacatgcatcaaacaccaaggggaagtggtcatcctggatgatgcttcgagagggaatgtgtatgcttgcagtcctgcattttcagtacagggagcctttgtctgtccagcaggcacatgaagattgtggtggtgggcaggagaggctaaggggaaacagaggtgaggggagcagacacagtcctgcattccactcctccagaggggcttggaacttctctgatgttccctccccctctccaactctttgtctcccccttttctcttctcctggcatgcacctgggcaaattccattaaaaggtgatcagaagagacagaagaggctaatttagacacaagaggctgatttcactgtcttcttttctcttttaaaatcatgacacaaagttccagctcaattttgtgggcaaatctcaaacatctctgttcatctgagacaacagtgtgggctcacccgaatatacaattttgatttcgttatatggatggaaaaaaaaaaaaagaacggtgaggtatttgaagattattcaactgtctttgctcatagaaatgataaatctttcactagattgcccaaaaacatgtaattctatatctgcctttgaattgatcggttctatctatctgaattgaatttagtaaacttgagcacttccatttttagatcaggagtaagagccggtcaaaatggtggctgccactttgtagggagactggaatgcatgttctctggcaaaaaaatcactggttcacaaattgtaccagagccctggatcagggggagggcacttaggatctgccaccttggttttccttggctaaaatgtgagaggtatggagcagatttgagtttccaaagtgcgtcttgctgagtagcaggaatccttagtggcacttggacactctggttggccaacagggcaaagcacagggtttcctgggacacctgtccctgtacccatagggtaagactgccttatgctcatatcaatgcctcctcatctgcttatctgacaattcttgctaagagagtctgtctttgactgcatgtctattatacgtgaacttgcatttctaaaggtcctatgcaaatgaatttactttataaatagtgattctccccactgagaataaaaacggatccaaagcaagtatttaaaaagctgactttcctacttgtatattccttgtggttttggaggcaagtatattcctgattcttgcttgctggttggatgtcagtgatctgaagaaagcagagcaagacccacagcaagacctctgatatggttgggctgtgtccccaccaaaatctcaacttgaattgtatctcccagaattcccacatattgtgggagggacccagggggaggtaattgaatcatggggggccagtctttcctgtgctattctcgtgatagtgaataagtctcacgagatctgatgggtttatcaggggttttcacttttgctttctcatcattttcccttgctgccgccatgtaagaagtgtctttcacctcccgccgtgattctgaggcctccccagccatgtggaactgtaagtccaattaaacctctttttcttcccagtcttgggtatgtcttgtctttatcagcagtgtgaaaacggactaatatagtctcattagagctcttgagaagcattctaaaacctgcactcaacatgataaaactgaacccagaagttaaagtaaatgaatgttttagtcaactgagagctttagaagttttgcatttcttccactcacaccataaaaatcataaatgagtctttttaacctgcatttgcctcctctggctccaaacagtttccattaggaagtttccattttcagtgaggaaaaattaaggtttatgatgaattccatcattcccattacagcattctgaaagcatcattaggatgacttcagcacatccattatgaactctaaggagttgacaactgcaccaagaatgtgccccctgtgaagctgtctgcaacatgaactgaccaaagacagaaactgagttttgacttccaacactgagcaaaaaatgaggcaacttgcaaaggctctcttgtgaatgaaaatgatgacagttacattttatttcagttttttgcttctaagatagtgaaatagtttttttttttttttttttttttttttgagacagttttgctcttgtcgcccaggccggagtgcaatggcgtgatcttggctcactgcaacctctgcctcctgggttcaagcgattctcctgcctcagcctcccaagtagttgggattacaggcgcctgccaccacgcccagctaatttttgtatttttagtagagatggggtttcaccatgttggtcaggctggtctcaaactcctgacctcgtgatccacccgcctcggcctcccaaagtggtaaagtagttttactgttacttcacatgtgtaaccattccctatagaatgtggagcattgttccccagcctaagttactacacaaaaacaaaacaaaacaaaaaacaaccccacaagggtttgctctcttcctcatctttaccactttgtggtctaaaaggcattattaactaaggagaaggttcttattctcaacttttaagagggattaatatcaaattcagagttgtggagaggattcatctagtgatggtggcaaagtgcctagcacaatgcctgaaacacaggtggcggctaaagcacatcagttgcctttctatttccgatttcatcgataaagatattgaggttcagagtggcacacactatgtttaggagagccggaactcactctgggcttttcattgcagattccacgcttgttccaaggaactatgcccgccttgggccaatgccctgtggtactgtagctcatttccccatctctctgggtggtccagggcaccttggatgtcctcctatgtgccctgcaggtccacagaaagtcctgtaggttctctatcccatccttcaccgtgcatagtgctgcaggtaggcagccctcagcaactgtaatatcttcccaactggcctcgcttggcctgtgtcttaccactccaacataatgtgcaagtctgacacataaaaatccctgatgctgaccaagctcggtcacgttcctctcccgctgtataagcttcagtgataagcactgttcctgctgtagcccaggcagactgttcaaggtcgtcttgtgtctttcttgtcacatatcctgccagtgctgctctcacttttatgttcctccaagacaaatggcttatatgcctcaaaacacactcccctcttctcttccccaagtctctgctcgtgctctccctctccctggattattcctcctttctcccctttcctttccttccttaagattgagtgcaggcatgtcgttctccaggaagccaacaatgaccccccgtgttaaaaaaatattattcaatgatgcctgctgaagcccgacaaggcagactttattcaggaccaccacgatgggtatagagaccaccacaaccaggtcttgcagtgggggctgggggcgggggtagattgagctcaactccgaatacagcatggccaagaagcagtgtcagggtcagtggtggaaaattactaagaggaggcatcggggtaaagaggactctggctaagctgacctaataggattcttgctgaagacaggcccgggtgatcagacatcacctgacggatggtagaagatgaagaacccaatcagatattaagggtgggggggttcctgttaaactgactttgcggggttctttgctaaaactgggttttataaggaagtgcacaggtgagcctaggaaaaggttcagaaacctgacccaaatttggccaagcaaaaaatgtttgtcaccccaaacccactcatacccttgtccaaggtttgttaagcactctccaaacttcctacgtctgtctccagcaccgtgctcacttcagtaggtgaccacctatgtgatgacaccctggttctaaacggtgaacctcctgacggcttgagccacatcttattccacttgatagtcctggtgctggtacaaaatagtctctcaaaaatgccagctaaagaaacaaactgatgtctttcttcctgtcactgtcatccactgcttctactttgatcacatagaactaaaaactagttcctctttgacacaagagtcattcatacatttgacgacagatgtcatctcattcacatatccattcatttgatcagcaaatactgaatagccttttacatgatagatatgattgtagatactctagaaaagaatagataaatgaagtgtaaaccctgccactaagatgagtagaactttggatagttttcctggatcttactttcgaacattgcaaattccaaccccccactgcccaccttatcagtctcatttaaacaaatatttttaaaatttgataatacagtcatatgataaaaaacaaaataaactttttttttttttttgagacggagtcttgctctgtcgcccaggctggagtgcagtggcactatctcggctcactgcaagctccgcctcccgggttcacgccattctcctgcctcagcctcccgagtagctgggactacaggtgcccgccaccacgcccggctaattttttgtatttttagtagagatggggtttcaccgtgttagccaggatggtcttgatctcctgacctcatgatctgcctgcgttggcctcccaaagtgctgggattacaggcgtgagccaccgcgccaggcccaaaatatacttaaataggatacactgagaaagcttttcctacctctgtccctgtccactccattctcactctgcctgttaggtgtaacctcatttttttaaaccatttttattattttggggtttttttaatcaaataaaagcaattatgattttatttcccccactttaagtaaataaaaggtaacatgctatatttaaacaaaacaaaccttcaatgacttccctttgctcctgaagttgaacctaagccttctggttcacattcattcacgcatccctccatttattcattcatttgtctaaacactgttctaggtactaggaattcaaatatgaacaaaacagacaaaactccccgccctcttggagcttacattccagatggggaaaaaagacacaaaacaagatagatgggtacaatccacagtatgtttagacagccttgagtgtgggcaacagagcagcgcggaggggcagaaaagctggaaaagtggtgaaagcaagcccggccagggaaggcatccttgagaaggggacatgcgagtgcatgaggacctgaagcaggtaggggagtgaaccgttggatgctggggaacagcattctggcccagggaacagcaggtgtggaggccctgaggcaggagaatctggcatgctgcaagcccagcaaggaggctcagggtggctgcggaggagggtcatggagaaagtggttgggaatgaggacaagagagacctttagccattggaaggaccctggcttgtattctacagaagtgggagccataagggggtttgagcaaaggttagcatggtctgttatgacatgatttccatattacagaagtactctggtttctgtgttcagaatacagcgaaggggcgagggggaagcaaggtacccatgaggagacagctggggtaggcagggcagtgggagcttcttctccaaccagtgtccatacctcctccagggaccccctctgcagtacccactttctaaagctcctcagccagctcctccctgtctcattcctgcctgttgaactcttgttcatcctttaaagcctatcattaagtccaattcctccaggagctcccccatcccccaactaagtgttctttcccacctgtaacctggtgactcccacctcccgctgtcaccatagtctgcttggcatcatagtcatgttgggacttggcaatcttcatactacaacaaaagcttcatgaggacaatgcagcttattctgcagctccccagagatgtagacaaaagcttgtgcaagtcaatgacaccaaaattcggagaactgcaccagtgggggctcatctgatgcaaaccaagagccagaattcaccagggcatcaaaaggccatggcttctggtgtgacagactgaagggcagcctttgtctgtggtttgagcaaaggccaggccattcattgtggtcacaggaggtggtgtagggttgtgatgacatttctcacaggcctcaggggaagcactgtgcttgagggccacatgtgtgctctgtgggtgtcacattcccggatgtgcttcctatgtccttgctgtggggggcctagcaggatgccaggcactggcccgcaccatcacatggagactgggaggcccgaccacatggacactgctgagggccaggattcttcttatgggtacactgcagagatctccagcaccaaccccatgacaagaggaagagcagagtcaattggatgcatgtccaccttaaggacctgtctttagggcatgtttcataaagtatccagcatataggagaatttgtatagaatttacaaataaaatgctttactggcagatgtactaaaaaatcttctaccaaggaggttcataatccaaaacacttggagaccatgtgtttaagcaatagtgtgattaaattcccagttttctttaggctttttcatgataagcaagtgtaagaaagagaacagaagaacattcttcttgatatagttaaaggaatttctatttttgttcacttttagggcaatcaggaaatgggctcaggagtgtatttctcttagtattgctctcttactggtaaaatttgcttggccacagggaagtggtataaagcaaaacacataaccttttttttttttgatgggctttgaaggtgttaaccagaatgccccggagaaaatacgggaggtgctggttctgcaactacagagaatgacaactaagaattctaaatctgaaataatgaaattgtttaaaaaaacactttgaagtttaatgagtattaattttctgtaagaaaacacaataactgatattaaacttcagccaggcacagttctgatactttgaaaaaaaaataagaaacgctgaagtatcttttgatactttgcctgaattactacaagagagtttacaaatatgtatttctgggataacacagaacttttattccttagataaaaaatctgagtggctgatttatgccagtgaccaaaatgatggctgcaattatgcctgctctatattcatgttgttaaaggtgaaaatgctaaagactttttttttagcagaatggtgatcatgatctgttaacacagtagaaacaaaaaaaaaatccaagtataaagaaaaaaaaaagaataaaaaagaaaagagaaaaataaaataattgggaaaaacagggaggaagagtgtgtacaaatgtacatcttaagactgaggtcacagttcatactagatttcatcttgtttgttaaattccatgtgcgctcagaattccattaactcttattccgtattgcctcaatctttccttaatatgtaaaggttaaccaccccactgtaacttcttggaaacgcactgcttgcaatgtttaagatgaaaaaatagccacaggcaaatcaaaactctacttaatgacttggagaccagcagatgaggattaggggaggcaacatttatttggagattactggggccaaagccaccctaattaattaccctttatttgttctctctttccagagccaccttgctttaattactgactttaatttctgctttgatgccattctcagccaggggcacagcactgcagcagcaaaaacctggggaagaacaatcacccaggagtgggctggctgtggtcactcaggcccagggaacaccagtgtctggttagccctcatccctgcgctaagcagctttcacaaccccacggctggttcattctcaacaagtcagtccttcacacgcaaagtaggaattctactttccagggttaatgctgcctggaaaaccttttccttccgctgcagcattccatactctccttagaggagatgattctcccagggaggctggcgcagtgaggggtccaggcacacaccacgccggcacctggtgaatagctggctgaatgtcagcggaggagtaaaggtgagagggtcatggagggaaggggaaaaaaatgagcaagatcaaaatctgcaactcttcaataaagacagaaaacccagttctgaatggcttcgctaaagatcgtttgtatccacacccagtttcaaaactcaagaggcaggtcagaaatggttttctgttgttggtttgttttttctttttcaccaagtgctgggagaaaagtgagttatgtgctcttacctgctatttccattaccatacacacaccctgtttccatgtctgcagttgagaagtcccaacagggcactgcaaacgctttctttctgcatttggcctgcattctttgctgatgacttaaaagcctgataacaagtcacacgaggaagcatgtcctgtcatcttcatgaaggtcaccaatgattcaaaacatactgaaggaacaataaactacatacaaagaacaagcaagaccccaccacaacttggatattatctctgtccacccaaagagagaacaactgtgccaacctggttcatcaggaaaatctaggtgttcccgtcaagtgactaaaatgtgggcacacatctttgcaccgagtatctgattcctaagagctgttccctttccatcaggcctagaatggcccagttagttttctcctggtgaactgtagcccattaacattgacggaaaattagttgttaatattgaaaaattgggaggtgtcacacagaaatagaacttctgacttctttttggtggtggtggcccggggagatgtggccaccctgggcccagagctccatttcactgtggccgagcagatgccccttgttggggaacccatgctcttcaaataccccaggcctcatcactgtctgtggtctactcgcccctccaccaatgatggctgctggctgaccagcccccagggcatttcaatttgtggcttaatttggtaattcatcaaaaacagattagtcacctgctagggccagccatggtgtgaggtgccaggcgtacaggcagagaagtttacccagctctggggctcaagctgttctatgcctaacaatttacaccgaattatacatggagagggcatggccctcactcccacatggtaattgtgtgtgtgtgtgtgtgtgtacttattttttcatctggcccatgtatgggcacatcacattcctatgggtgactccctgggcatctgtgaaatgttgtctcccactcctgaaattatgctgtaaatgccagggaatggtggtgacatggttatagcgacgatcttgattctgctcaaacataaaccacagttggtttctttagcaattattaagaaatgattgggccatgtcagaggaagacagaggaagaatctgaactgtaattcacttacagatttctacagaattagctcatgattcatggaggcaaaaaaagttttgtcaggaatggcattcgaagacacagaaaaacaatttgaaaggagcctgaggtccaggtgttttcagagtgtggtctttaagatagtttcttaaaagatcattcggagaagagagcattttaaactgctcttgtacaaatctatggtacattttattccttatgttgaaaatgatgggaagattgtgcctgtttcacccatttaagaaacgctccctgttggtccaagccaccgtgggctcctccatcctgagggaggacacagtggctctactgtcctctgtagaggtgaaattatgtggcacatactgtgatcaaccacagctactgccaactccccagccaattccccatccactccccgccatgggtactggccgcttccagactctaagacagaggttcttgcgcaggggaggttattaggacgagtggtggggaggggaaaggaaactgggcagagggagagtgaagctaccaagtggtcctagtggaagcctagccgactctacagggagctttgaggatgagacgacccttatcggagcaggaggaccgggccttgatacccccacgttggtcagttctgggaaggggctaccctgagaagggggtggaacttgggcaaggtggctttgctctgccccaacagggctgactgtcaagggaggctgggagacaaattctatttttctgaagtgacctggggtgtgtcactgtgaccagtgcaccgaccagctaaccgaccaacccgcaaggcccaagctcaaggaattagaaggctccagacttgcaccctaagttaatcatctgaagtctcagaaatgtgacagcctttaaactgaacactacaaaaatgctgcttattccactccaaatcattagctcatcatccatgtaaggagcttcaagaagaatatcggtaagattagcggtaaattcaaacagtttaaactttcagtataaaccgcatcaactcaaatcccgaatactgactcaacaatttcactcctaggaatttattctaaagaaatcctcatggctgtgggcaaacattagatgcaaatatgttcctgcaaggcaaataaaatatgcaaaaatatagttttatgtaaataaaatacatcaagatccgtgatcagataatatacatgctaaattcattcagtagactatagagccactcatagtaaggtggtgaaaactaatgacatgaaaagatgttcaagacttgctgttaggagaaaaaaccaggttacaaagcaatgtttattgttctcattttggtgaaaagaaagaatatgtgtgatagtattagaagactcctgtgtttttcttcttgattatttggatttggattatttagattctagcatgaatttccacaatgaacacttattacttttataataacaaaaaagcttctcctttccccttccctcactagatgctatatatcaatggtcaaggtaaccgtggttaacagacacaatatgtaagggtaaaggttagttggagagaaaatcgactttgcctgtttttgtgtagtggtttggtatcacggcttttaatatttgctctgtatctgttatgcacaatctctaaacctgctcattttaacccattaacattttggagtgctagttattgaaagaatcctatttcatacctagaaacagggatttcaccagaaaatactgattttgtctttctttgattacctctcctgcctgccatctttatctggtgaaattctcatttaatcagtagtgttggctgagccattctcactggagtcagggctgtctgagtgccaggggacactcatctgaattgtttcttgtcactgccatgtccctacatctattccttgctcacctgcattattttccccattcttcttgcagtcccagaatcacatccaagccccttttctttctccctggatgaccccttcctctgaatctcctttctaacaagactggaaggttacataataaacttctccccattacagcattaatgatgacagttgtttaatatataaggccttcccagagaatttgtatttaatcagcaaattctggagatcagtctgcatctcaaaggaatgcattgctaaggggaaaattccaggcagtaagtcagttacaggggaaaattctctgcacaggtgggctcttccggggctgggtgctgcctacgtattgttcaagcacctacactgagcagattcttgcatggactgactgggattaagggcagacttccaagaaatcactcatgtctccattcattcaaccaccatttgttaaagatctcccacgtgacttctcgaactccttggctgggtaaaattacccctagttcttagtatttaccacactttaattgatttccttcaccgaactaagggtagaccaagccagagaccctggaacccttaaaacccttcataaacatttgttgaacaaatgcatgcagccaagtaactgactcttccttagagatataaagatgaggaaggtatggttattccttcaaaaagctcacagtgggccaggcgtggtggctcactcctgtaatcccagcactttgggaggccgaggtgggcagatcatgaggtcaggagttcgagacaagcctgaccaacatggtgaaaccctgtctctactaaaaatacaaaaattagctgggcggggtggcgggtgcctgtaatcccagctacttgggaggctgaggtagaagaaccgcttgaacctgggaggtggaggttgcagtgagccgagatcgcaccactgtattccagcctggaatacagagcgagactctgtctcaaaaagaaaaaaaagctcacagtgaaatcaatcaagaaatactaagccatgaccaggtgctcagtagtctactagggcctccaaaagcctcagtttctgtccctacaggggcttaagatggaagcttgagtgatgagactgcagctccagtgataatataaatgatctctcttgtgtgtcacagacactcagagctcaggatactagaagtggagcgtagcaatcagaaaagtctagctaggtatataagaatcccatctcaacctccaattggtccagttacaaaaagtcctacagatgaaggacttgagaatagggttaggctttaaataagtgggaaaaagatatacctctgcatttcctcattactacctaaaaagaaaaggtataaggaaagctttccccaatcaacctacacaagaatctgctcagtgtaggcgcttatactagttagttaacgttccactatcatccactgtcatgtggcatcaaataagcaggtgcttttattaaaggacatatatactttactcattttgaacaaatttgatggcttgtatttttttgcatggcattgggttagtgctaatatctattaacggatgtcctggatttcttaggaaatcctacctttgcatatttcattttaaaaataaatgctattcacggggcgggagcgatggctcacgcctgtaatgccagcactttgggaggccgaggtgggtggatcacaaggtcaggagatagagaccatcctggctaacacggtgaaacactgtctctactaaaaacacaaaaaactagccaggcgtggtggcgggtgcctgtaatcccagctactcgggaggctgaggcaggagaatggtgtgaacccaggaagtggagcttgcagtgagctcagattgcgccactgcactccagcctgggtgacagagtgagactccatctcaaaaaaaataaaataaataaaaaaaatttttttaatgctattcatgcaacacatttttaaaattttggtaaggacataaaaataaatacattggacaaaatcttgtgtttctgcatacacccaaatttgggcttggaaagtgcctataaacagaggtgaggtggggaggatgccatgtgtggtgtggtgggatgtcataggtagctatgataaagacaattctggaagaacaaattctctgaagatggctgcaacactgtctcctactccacatgctctcctacagccttgccattcctgttgggagaaggaatgtatgtcccctgcccttgaatgtggaggacctttgtgagtgcctcaagtgacactatatggtggaaaagacaccaagtttaggtcataaaaagccatgcccttctgccttgttctctcggggcacttcctcttggaacccagttgcccaccatgctttcaggaagcccaagcagcccatgaagagcccatacagagacgaactgaggctgctggcccagagctctggctgagctcctcactggcagctggtatttttgccagctatataagtgtgacaacttgggagtggaccctccagtcgccagccaagggaaacccagaggatgatgcatggaggagagaagaatcatctctgtgcaaactgcagattcacaagcaaaacagatgactattgttatttacagccattacgttttgggtggcttgttgtgcagcaatagtaactggaacaacatttctgcgatgggcagaagtggcaaggattgtaactcattagactcagaaggcgaggtcacctgagtaagcagggtccttagtggaacagtgggtgtaagaggaaggagagatgggtgggtgtggggcttcttgccatctacatatgtagggtctgccttttacttgcacatctgtgagaggtgtacaacagagttgtagaagtatggactctggagccaggccacctgggtctgaacctggtgttccatttcttagctgtgtgaccttgggcaaggttctcaagtcccatgtgcttcagattcttcatctgtaaagaggataatcacaggacctacctcatgtggtggtggtggcacaaattgacctaatgcctacattgaggcttggtgcataggaagtttccatgaaagcgttcactgttatgatccacataggtgtgggcctcagactatgagctgggctgaatgacagcccctccctagtccctggagcttgtaaatatgttgccatacatggaagaagggactctgcaggtgtgactaagctaaggatcttgagactaggagatgatggattaccagggtgggcccagtgtaatcaaggtgtctttataagcaggatatggcagggctggagtcggagatggagacaggatgatggaagcagagattcgagtgatatggggccatgagccaaggaaagtgggagtctttggaacctgggaaaaggcaacgaaacggattttgccctagaagtaacgcagccaggctgacacctgattttagcccattgagactgattttggagtttgatctccagaactgtacagtcataaatctgtgctgttttcagccactaaaattgtttggtaatctgttacatcagcaacaggaagcaaatacaaatttaagactggagaaaggtagctttatagaacatccagcagctagaatgttcaaaggaagttgggctttggaatcaataaactgctgtccttttatttcttcttctcctgacttaggcttcgagggatgacattttctttttaatcctagcatgtgaagtggccaaagctcaggcttgggtgtcagatgggcctgggcaggaaccctggctgcagtccttacttgctgggggtcctcagtcaactggtggtgctggccaagatgaccacagtggcactgacagccagagtcagttgcctgctagccattcggagtggtcagtgcccacgaggtaccagttactatgtgctatgaatattatctctagactgaatcctatgaacttcagtttcctcatttgcaatttgggaacaatctaagtcaaaggttgttgtagaatgtgcataggtaggtgcttttcagactgtggctgccacagcagcagtagctgccttacttggcaacttgccagaattcttgccctacctattgtggtaggctgaattctcaaatggccccctggtggacaagctttgcatgatcccgggactctgtgatggattctgtttccacagttaggttatattaccctgggagattatgtggggtgaacacttaaaagggaccgggttctttctgaagtcggagaaaggatgggagagacattctctgttgctgattctgaagatggagggggccatgtggcaaggactgagagtggcctcaaggagctagagtggccacggggatctgaatgtgcttagaagcagattctccgcaagagtctccagacaggaacgcagcccaggagagaaccggttccagccttgttaaccttgagcagagaaccctgttgtgcacatggtgatttctgacctacagacctgtcaactaagaaatgggcattgtaagccactagatttgtagtaatttgtcacacagcaatagaaaactaatatatatttactgaatcagaaactctgctggtttttgtttgtttgtttgagacagggtctcactgtgtcacccaggctggtctcaacgagcctttgctgaatctcttccttgtcagaggagactgctggtccccaagatagaaagtaaaggagacccagccctgctgtcaggaagcacccgcctcgggttggagtaaaagtcacacatgggacggggctgtaagtctcagcaaacagcagtgcgagggacgcacgtggaagaggggtagtgagggcaccttgtgggcaggagagccttttaaagactgtatgacgtgaactccaagatctatccttgaaggccagggagtggttgaaagatggagccctctgatttctgacttcacttctgcaaagcctactgtgtcatttactcctcaccatcagtggagcgagagcctctgggaccacgtctcccgagtcccatgcctgccatcatggtgcgggctggaccagccttcttagtgggatatgttccccatagaaagtaaaccaagaggcaaaagcaaagcaaagctacgaaagcaggctcagtgcccccgccccttgtttcagtgtcacctcaagtttgcttcttgctctcagagggagatcacagcattgcacaacgggcagtgttgactatttgctggcccttgtcacccacccttccaaaactcgggcagaggacaatctgaacaccagtgtgacagtttctaacaaaaggctttgctagtacagtgcctgagtgtgggtgtccactgaaaactaatttcagccctgactaagaaaggcatctcagaaatgaggaagtgtattttgggctcctgtggtttctgatgaaaaatgctgcaatgtggggcatgggtgaaagggaaacactgagaaaatagatgtgacccccagtatgcttccttgaagaagtggggggctggccaggccaggcacaaagatcctttgtgttccctgagcctgtgacttctcccgctgtttctcagcagttacactaacgacattgtggaggaaacagcttctccttgcatggccctgccccttgcactctagactgtttagcctccctgctggtcagtcccctctccctacaaatgccagcagctttcccccagtccttgctgcaaccacaaagtctcgcaaggattttcaaatgccactgggaggatagcggtgccacccatggagaataatgaccccaggccctaaaatgaaacaggttgctctaacattcgaagaatagccccagcacaccaaatgcattcacttaatttcttgttcaacagaaaagaatgacctcttttaatacagagctgctttgaaacatgtcatttcaaacaggtcctaagaagatcctgatatttgtctgtatcttaactggatctctgtgggttgaaaaacgctcatagaaatgttgaaggacatcagtcaatctttaataagatgagatttctcagagatacaacatgctgtttgaccatctgaaggatgctaaaagaaagtgatttactgaaataaaatagataacaaacatttcagtgacttagaaaatggcgagaaatcacgtcaggcaagtttatatttttgtgttaaaaaatccccacctaacaacactctcttccttacatttcttcccagcaggccaagaacttactaaactctggctctagaagaaaatgacattaaaatgctgactttacaggtatatagtctagcatttgttggcagttacttattagtttttttttttttttagaaatgtaaaaactattttctttgtttcaaacgaataggctctaacttaaaataatttacttgtacaattaaattgtctgaaaaaccccaacaatgctgttaacacgttgttaacaggtacacaactcccctctattttaggagctgacgcaaagaagacagcacaaacatgaacaagaaaacaatcgctgtcgcttaaaagcaacaccgtcttagcagtttaaagacagacactgcatgctcacatactaacaataattatgagtctccaactcagagggtagaagtcagaagacgcaaacaacatccaccgtaccaggaactgaagaataggaggaagcaggtttagaatagcaatgggtttttccctgagatgtacattttacaagaagcattcaattccattttagatatggaaaaagagcgtgtttttcccattaaaagggggaaacaggaaaagtataagtagcttgacccattattatgtcctacctggaaaaaagtttttttaagtggagaaaatgattagtcatgagtgcatgacttattaaaaatgactttctgggtaacagagaccagataatacctacgtgaataaatctctccccaaaccctagtttggggcccacacttttgcaaggtctccagtgagtaagacagtaaattctgtggctggcgttttctttggaacacaaagggtcgcaaacaaactcctactcagctgcagccactacccctgccaaaattgagtagctgaggattcagcgaagggttcgggttccacgtcacccaggtgctacaggagcctgagcccaggagcggggactgtcccacatgccaagagaatagggcatatccaggagtccaggcccatcacagcagccaggtttttacctaggtctactactctttccacatcacagcttcccctcacctttctccccctccctcacctgctcactgccatgtatgggaatgcaccccaggaaacacacaattttgaaaaacatcgtcccaagagaaaaaggctgtcatgaagaggccaggcaaatgacctcaattaagtactttgtccaatgctaatggattgaattctgttcccctaaaattcacatgttgaagtcctaacacccagtgcaatggtgctatggtttgaatgtgtcccccaaaagtttatgtgttagaaacttaattgccattttaacagtgttgagaggtagggccttgacaaggtgaggaggccacgagggcagagcccttacaaagggattcatgccattgttgcaggagtgggttagttatcctgggagtgggctcctgataaaaaggatgagtttggctccatgtcctctccctgtctcctgtgcttgcttcagcttctgccttctgccatgcgatgaccctcaccagatgctggcaccatgctcttagacttttcagcttccagaaccgcaaaccaaataaatctcttttatttataagttacccagtctgtggtgttatgttatagcaacagaaaatggactaagacatggtatttggaggtgaggcctttaggaggtaattagggttaggtgaagtcaggtgagtagagtcctttttgcaagaaggtgacagtctacaagccaggaggagagccctcaccaggaatcaaccatgctggcagcctaacctcagacttctcaacatccagaactgtgagaaataaatttctattgtttaaggcacctagaatagggcattttgttatagcagcccgagcagatgaagacacctaccaccactcagctttggaaccaggattctgaaccaaagcctatagatcctatgttcttaacaactgcattttactactctttgagaagaactgaatttagccaatcaatgtaatttcacattgattttcattacttttgctttcaaagttacatatgaaattttttttgcatggctagatatgtgctggatgactaagaattttataattggcatatcaataatcaaatcagttttcctaataaaatgacatgtctgatttctgcaaaagctcttcagtgtcctctcaaactgagaaagctggaaagtagagttttcaaaagagtaaaaataataataaaaaaaagttaaggcagtactgctgagaatttaaattctctgcaatgtcgaaacttttgaaatataaaacttttaaaaacagtttcactgaggtataccttacatcccattttagcacttgtaaaacctttgtctttaactgtattgtgataacattgatatcctgcttaacataagaaatattattttaattgaaaacattattcatgataatttaaaaagctgctattaacttctacatctgtcagtaaatctactaaagtttagttcaaaatatgccggcaaaggaatcttaaattctcttagtgccatctaaataaaactgtatttcttctaagttctattgtaaacaaagcaaaggactatgccagaatatatagcaattagagaaaaatgcctacttttcctctttgcacttattttgtgcgcttgtttcttgttttgtgtaggtttgatgattttgccaaattgcacggtcagcaaacagttcgttgtggtccaacacccaggatagggactatgagaccgtttgccaggtgctaggtggtgttcaatcatctcacgcctgaagctcttcatcagtcttctgttgctcaggctcttcactgtctccatcccacgtgatgaaagacaggcgtgtctctggccagggactaaggcgccatgagcatgtgtgctttgtttgggtgttggtgtgctctgactcatgctctcagtggccctcgaaggcaccaggtgaaagaagagggtcagacaaccactagccacagctgtggcagcctcggttcaaaaatgtaaaatctgccatgcaggcagtttcaaagacttaacctatgcccttgtataattattatttttacttcttttatagcaacgttcattttctaacctgaaggtggttcaggtgatgttctaatctgcttttgagtttgaaaatgcatctaccagatgattcatggtggctgccgaggtggtgaataccgaggatcccaaaatgaaaaattacggagggaaacttagaaaagtagtactctctcacagccagagtggtgctggtgaccctccagtccaggctaaaacaggtaagcaaaatatttgccttgtttttaatatacatcaagcaaaacaaggtttaactctatctgtggcatctacagcagctgtctccaagatggaggacaatgatggggaccaggaggaggtcagcagcctcaatggctgatgttctgaaatatttctgagcggagctaagggggaagtggtttgccaacattatcagtttattcgtttgtccatccatcatccatccatccatccatccaccgaacacctacaggcactgaccatgccagctactagaacccagagatgaccatgccacccagacagactccaggaggcactgaacacagacccaggtgaagttctgaggcccaccttgctccttccccgagatgtgcctgctggtggtggcagtgacagggcggcacatcaatgatgaggtggagtatggaagaatggaagcactgccaagactcctgagtggcagaggcccattctattatctgtggacaccctcgttgtatttctaaagaggttttctcacagagcaaaaccacctgataccctaaaatatcatttagacaattatgttattattgtcccaattcttacttccacgacaaaacagcagatgtgtcatctcccaatgaagatgaagacaaaactattctcaaaaagaaatggaagaaccatgaagtaatctccatttgagaaacagttttgcaaattcaaagtggcttctgtgaactttgttttggctgaaatgaactcctcccaaaaatacatatgttgagtcctaaccgtcctggtacctcacaatgtgactgtatttggaggtagggcctttaaatgggtgactaagttaaattgaggccattaaggaggagcccaatccaatctgctgggtgtcattataagaagaggagatttggacaccagacagagaaaagaccatgtgaggacacagagatagcatgtcatctatgagccaaggagcaaggcctctgagggaaatagccctgccatcaccttgatcttggacttccagcctccaggattgtgaaacaacacatttctgttgtttaagccacccagtctgtagtattcatcatggcagcccaagcagactaacaccactgccaacttaagagcatgtaacaatataaaatatgcccatctcaaactaccaccttcatccttataggtctctacagttggctttaatgttctcaaggaaaagcctctgaaagaaaatgatgagacaggaatgtaatgaatgtagcttcagtcccccatactaaggcatgcccccactacctttagatccatccaatggagtgggcagagctttatcatatagccgatagaatctgtatcctgctatcaactaataccaagctgtaagtaactcattcacatatgcacaactcaatgcacataactcaatgatgttgataaagtcagacaaggaattctatgacaacgattaaactcaccttttcaaatgccacattttggtaatcatctggaatggggctcttgtttttaaaactgggaagacccaaggaaaatagtagaaaggcttttaaaggcacccgtgacgctaagggaaaacattagaatgggtgcataccaatagtaactatttttaatcttatgtcctgaacactcttcctttttggatggtgtgtatgaaggtctgtggctggcttctaaactggaaaagtcacagatatttacccttgcagaaaatatctataatcatttcttccttggaaaaaataatgacaaaccctgaatcacatttcctaaaattttaaaataatgatgttgatttgctggtttatttgaaaattccatggtaataaagtaaccaattaaatatttaacctacttttactgggacaattgagggaaaacaggaggaggcagaaggcagctctctcactggttcaacaattcttcagctagtccaaaacccatgttctggtgattggtgattctgaaatacagctgctgaagtttccacactgggacacttcccctagtgaacattcttttttgattctttaagtcaatcttaaagaattctgaagtctcccaaacctttgttcattggacttccagcatttttcccttgccactaatgtcaaaatcccttcttatcccactaaactttctgaactctccctgaatgttggaggatgaagacaagtgggctgtgtaaaaaaaaaatcttagaatgaagacttaggaatagcgatcatgggtcccaggggaagacttagatgaccaacagttctaaccaccttccttgctcagaaagtgtccagtcaatggagaaaggaaggcattattagctcttgataaggctttggcagaatttgggacagatggctgtgtgctcagaggatcaagtgaagtttaagatacaaggtggaaaggccagtaggactcacgtgatgtctctatcagggttcctctccatcctagggtgttcctcactcctgctggagggctggtgtttatatgatgtagagaggtttgaggtcttggatacagaagggctggctctgcattactagcgttagaggcacgataccctttagggtttggcttcttgttgaactctacagatgttgtttggtatatagtgtccaagaacagtggcatcacctgtgagcttgccagaaacgcagaatctagagccccacctgagatctactcaaggagaattttcattttaacaagatccgaagtgactcctgtacatagtaaggtctgggaggcattggtctaaggtagagggggaggaagaacatgccaatttttaccacgtgattgctaagtgatactatgcgatgttaagttgggttaacttccagaccaacaattctccataggaaccctgccaggttaccacaaacggcaaacagggcagagaaacagggcaaacctggtttacgagattttttccagagaaaatgtttaccaggttgccaaaggcatcagaatcaatggaaatgacatcaatattcaatagtagtgtagccactcacatgcagactccattcctaactgaattattccattacatgtgcctattaaaaaaaaaaaccaatcatgcacacatagacacataccaagctgtcattattgaatgcctattcatggatgtatcgataataaaagacagtgaggaggctgacttgattatattttaactgacttacatgaccaataaagcaataaacttatttccctccatgggcaattttagtggttgagtatatttttagcatttccctctggagatatagctttatgaacttcacatgacccaaacttttaatccaccccatttgcgcaagtttttctttttctctttaataggatgatagaagactggaacataactgcctaattctgaatttcagactatctttctaaacacagcacaacacagggagaagcaactaccttctagaccataaatggcagagatctagaagcggccagacaaggggtatgagaaaaagtattacaaacaaaagaaacagacagatgccacatttttgtagcagcaactctgcggaagccaactgcttctcaaacctgacccagcagccacaatggacttttagatgaatgatccctcaccagcggagctcacagtgggggtggagatccattccagctgatagtagggacgagcaagcaactactgaaagggctttggtgcttttgcttcattggtgcttttcagttttatttcaaaaattataataataaaaaaaaagactctaggtgtctggatcagtatgccacatgatttatagcacataaaatcatggaaagtcatgccacttcctgatagcacacagctcacgctggccactgaaaccttttttctgactaattcattccataccgtagttttccatggctgattcataaccatatcctacttttctcatttcctgaaatgattctgatgaagcttattccacataaaaagtggaacaatatataaaacccagacacctaggtacaatttaaaaatcttaactctaaatcccaaatcaacatttggccatacattcctaagatgaaccactgtttctggattctaaaggacactgtatattccagtaagcaagcctgtagcacagtgctgggttcatgatcaaaacgcactgagttcattccagagtcagctctacttgtgatgaaacaaataacctataaagcgaaatcttttcagaccaaagagaggtctgaaatcgagaagaaacataatgaggatgcaaaggggataagaagcagcaactacaccctggctctgtaagacggcatgtcattacaccttactcaaagggactcctcaatatttaatcagcgattttttacattattacctaaaggaactggagtactttaagttgcctcaatttgctggcattttaaggaagataaatgctttagaattacttatgattaagacaaaaatctcagaaacaatgcactattcgaatctttagctagagctctcgggaggagagtaaacaagataactctactggttgcttctcatactcatcttctttctttgagacagaaatctttttattttcctagttagtaatcaagtatgtgtttctatggaaaaaatgtaaacacattttgaattatgccatcgctttcaccttgaaatcattattttattaagaatcactcagtatttctaactacctactagcaagtcatttttagaaatctttctttcaaagtgaattctgtattaggtgctgaaagtgtggtgctgaaaccacagagctgctgatacatctggaggctggggtaaacactggctgctgaaaccaccaggtgagaggcggatcaggaattgcagaagctgggccagactgaacacacctgaagccagggatggtgcttttaacatcacagaaggagacaatcagtgatcacatgcgtcttggtgtacagcaatagtcagtacaggatatttcgtgtgaagtagtcttgtccaaataaaaacaaaacaaaaacaaaaaactctgatttttcagcaagctcccaggcctctgagtttagataaatagatgtatattagtccgttttcatgatgttgataaagacatacctgacactgggcaatttacaaaagaaagaggtttaatggactcacagttccatgtaactgggaaagcatcactatcatggtggaaggcaaggaggagcaagtcacatcttacatggatggcagcaggcaaagagagcttgtgcagggaaactcccatttttaaaaccatcagattttgtgagccttatttactatcatgagaacagcatgggaaagacctgcccccatgattcaattatctcccactgggtccctcccacaacacgtgggaattatgggagctacaagaagagatttgagtagggactcagagccaaaccatatcagagggaatgcagagatgtgctaaacagtgctaacagtgcacttgctgtttccagactgtgggacagcctatgagacatatgaaaacagtttcactggggacctatgacaaaggatggagaaaccagatgaaaagagacagaagagacagatcactgaaatgcagtgagtgcctcttatttggattctaacgcaaacacgctaattataaaaagacattcatgagccaatcggggacatttgaacacagaatggatatttggtgatattaagaaagtacatttactttatttttgttaagtgtccttatctcttagagatacatacaaatgaaatgatatgatgcctgggatatgtttaaaatgatcccatgattggcagggtggctcatgtctgtaatttcagcactgtgggaggccaaggcaggaagattgcttgagcccaggaggtcagcactgtagtgagctgtggttgtgccactacactccagcctggcgacagagcaaggctgtgtctcaaaaaaaaaaataaataaaataataataataataaaaaaataaaattactccatggtgggaagtgtgggaaggaggattccatgtactgatcattgttgaggctgggtgaggagctgaatatagggagttcattagaatatcttccatgcttttgtatacacttgacaacctccataataaaaaggtatttttaaaaaaataaaaggcaggccgggcaccgtggctcaaacctgtaatcccagcactttgggaggccgaggcaggtggatcacgaggtccaggagattgagactatcctggctaacacgatgaaaccctgtctctacgaaaaatacaaaaaattagccgggcatggtggcgggtgcctgtcgtctcagctactcgggaggctgaggcaggagaatggtgtgaacccgggaggcagagcttgcagtgagctgagatcgtgccactgcgctctaacctgggcaacagagcgagactccatttcaaaaaataaataaataaataaataaataaataaataattaaaggccaaaaaaaaaaaaaaaagagcagtaaagacttgaggctaggtgaggtggtacatgtctgtaatctcagcactttgggaggctgaggcgggaggatagcttgagctcaggagtttcggaccagcctgagcaacatggtgagaaactcaatctctacaaaaaatagaaaaattagccggacatggtggtgtgcgcctctagtcccagttacttgggaggctaaagtaggagaatcgcttgagcccaggaggtcgaggctgcagtgagctgagatcgtgccactgcactccagcctgggtgacagactgagaccttgtctcaaaaaataataataataataataataataataataggtttaaaataaggtcagcactacccatgctaattctaaagggatgtggcataagatggctttcacaataaaatgtacaattcatacaagttgaaaatatgtaatttaatttttaatgatttttcaagtgaggtctctgatactctgatgatactaaaaatatacaacagaactctcttggaaatagtttatttttgcaatcattgtaatacagtcagtagcaaaaatatttagaacacttttcaaaaggctaaaaaaatatgacagaacgtttcagtgcaccgttcaggtgaagaccaagtattattgaagtttttgtttcttccaatgtaacagaagaatactgagcccagtggtgtgacgtcaatcacattacctatgaggttgcagggccatgctgagaagggtgctttcactgcactcctgatgaaaatatggggacacatttatggtcctttaaaagctgtaaaaggctgggcatggtggctgacgcctgtaatcccaacacttgggaggccgaggcaggcggatcacctgaggtcaggagttcgagaccagcctggccaacatggtaaaaccccatctctactaaaaatacaaaaattagctgggtatggtggtacacgcctgtaatctcagctactcgggaggctgaggcaggagaatttcttgaacccgggaggcggaggttgcagtgagccgagatcacgccactgcactccagccttggtgacagagtgagactctgtttcgaaaaataaaataaaattaaattaaatttaaaaaagctgtgaagaccacaccagagcccctggtaaaggtaatgtccattcggctagataagccacatggacacctcacacttggatagctcactccagccacctatgtcagaaacactaactcataattcccacaacgccccactgaggtgtgcaggtggcagcccacatgtttctgttccatctatggaaggctggtgcaggtcacgtgattgctcaagtcggggaatgagtcaaagggaaggctagaaagacagtccaacccaacaccctgagatcccagcaggcacctttaactatcacagtgtgcctttgccaagcctggggaagatgctaaaatgagtgacagattcagttacattagcaagtaacacgtggtggctttttaaaatttgagacaattttttaaaatagtaaacatcaacacaactttctcatttaacatacttgaaagatgagaaaggtggtggccatctttcacaaaaaaagatgatgctgatagatttaacagccactagtgatgaagatggcgatgatgaagatgatgagaaatagcagcgatccgaaattgactgccagtcacctatcaggtatggatgtaagcagtcaacactcactctctcatgtaaccctcaagccactctaggagacaggtactatcacttttttataggtgaggaactaaggctacatgttgtgcttaattctcttggatgtccgacctggaatcagaatttgaggtaaagtgacaatgaaattgtacccagcctaacacaaattcttaaaatagtgaagaataatccatcaagcctgtgatgaactatgttgacaagttcaagctgttgaggaggtgcttgtgcgttactgatagaaaaggataatgcttttcatgctgccgaccattcacaagacatttggctattccataaaagagattctccctctcgaactccgagggagaaggctgtttcaggttcccatcaccaaaccactctgcagctggggtgccctgctacccggtgcaggagccctgcaccaacactctgacaaagaactccatgagacagtcagagatggaaaggtttgccaggccaggacttcctctaggaaagcaggcctcaggttcagacctgtttaagctgacacccaactccacctccaccgtgactgagaattgagatgactgatgagctggaatgatcaagaaaggctaagaatcatcaggaaaggaaatgatcaagaagaaaacgttcatcattgtttaagaaggcagggttggactgtccattttagacactgattcctcaaatggttaaacatcacatttctaacaaccaagaggctatatacccttcagctctacagaaaatctggccatctcaaacaacttaacgtatttcctaaagattttgaattgtagagttttactctggtttttcaaggaaccacggcatcttcaaaaggacactggttctaggagtctgaagtcctggtttctagctctcgcttttccagtaacaaactgagttgcactggggagaacatttcatctcctggatctcgccctgtctgtcgcaaaatcaacggtaaaggctccctgggctccaatgctccaatggaattcagggaatccaaaaggatgtgaccggaaagaacacaatcatggataatctcattcagcttatataagtgaacaaagtgtgggaaagcaaggcagaggtattagcactcaagtgtattaatatctatgctaatggaatactacaagaaacattccacctaaatgctaaaaacaggtttccaattaatcataatttaacaaaatacaaattgctgtcagtctagctacatgaaattcccactagggccactggaaattgagagaatgcaaagatggatggatgtagtctacttattccaggaatagttggaaaatttggaataaggccaggattagggaaaaaataaaacaaaacttgcctgacaaattgagtagtgttgggaagtttaatacaatctgtgactgattcacagcgcaggagtctttctgtaagaagagccctgtttgttctgggcagtggcttatatgttcaagaatgagttcagatgagtgcaacttcaagtagagctccacaatgaatccaattacgtaggcggccaccacagcacttctttaactttcgtaggcaaggaagaagataaagaactcatttgtaaggtatacaaatgccctgctggtaatggtctaataagcctaacaatttaaatgccatgctctgaaataaccctttgtttcggtggattgagtcagccaaagtatccggaactgggtcccacagagggtcctgatgttctttggaacatagctcacattttccagtttattatgcaggttctgactgataataattctgtcacagtcaacctacactttgcagtttacaaggtcatttcacatgtattaactctttcaagtttctctaaaacctggagaggatatagggaaggtgttaactatccttacctttgaagaaaggaggcttggtgaattgagactacttgcctaaggtcaggcagctcacaatcgccagcatcaacattcacattcctgccctgtgattctgtggtcccggatggctgtacccaaatatttcttcctgaaggtctttgagttagtcctgaaaaaggcacggttcaggtacactgacatgccttcaagtttccacggtgagccagtgaacattacttaacgagagcaatggtgagctcatgcagatctcaggctctgaactgagaaaatgttcagaccattaaaaaacctttctccccccaacaattttgtcttttaatctaagaagtcaggttcttggcatttctgaccactctaacacaaatccagaatttgcctaagcgagcaaaagaggatgcacaaatcatgactgtaacaagcctggtttagtctgacggggttgccggtacaggcacattctaggatagatgcaggcagcccatgaaagtcccagggaaagaagtccacactgggaggggctaaaagcttcggacaggtggctaattctaaagttccttctgtgaactgctccacataagcaaagcaacctagacttccctaagaatttgaaagcaggatcttactttatcatttttccatcttttacgcttagaacaaagaagtaacaaagaataagaataaaaatcaaggagaaagaacagaggcaaacaatagtgcccatactgatacttattttaagattgttgatttttgtgggacatccatttcctggaaaactttacaaaagaggattgttgtaaagttctaaatgatgaagacagggctttataacggaaaccatttctcaattctttaataattttaatacttaataattagcaccagaagaaaatttggttgaagtgatgacaaaaagaaaatcatgtgtgaaaaattggaaatattgacatgatttcacaaagacatcagaagaatgatacatttgtgcaggaagtacagtaagagcctgggggaagctaaatggaaaattagtggtcaaataaagaaacaaaagagagcaatgtccagtaaggccattctgactataaagccattctgactatactcttacaaactgatgtgatttggctctgtgtccccacccaaatctcaccatgaattgtaatctcgataatccccacatgtcaagggtgggaccaggtggaggtaattggatcatgggggtggtttccctcatcctgttctggtgataatgagtgagtttcaggggatccgatgattttataagtgcctatcatttcccctgcttgcactcactccatcctgccgccctgtgaagaaggttgcctgcttctcctttgccttcctccatgattgtaagtttcctgaggcctccccagcaatgcagactgtgagtcaattaaacctctttcctttataaattaccctctctagggtagttctttatagcagcatgagaatggactaattcacaaactagtgctgtgttgacatcatgatcagagtaaatacgggataaaagttcccaagctatgcaactttctccagcaggagaaacttttttttgggcaagtggttactttaaaactttatttttagtacaagggaaaatgatcccaaaagtgtatttgtaagctatggtttgactatttttgatgtcaggaactgtgattcacctacaatatccaacttattttagatattattctaatgctctctacctaaacaaaaatacatttgaaatagtgaaatctttctccaagagttaaaaatgctggagctagttttgcttggctggtctgaaatacttgaaagcagaactgcaagaactagcactttctggaaagtgttgacctctttctggataattttataaagaagttagctacctcagtaaactgtttatgaaaaaaagagaagctaaacatgaatccatgcacagtgtcaatgcttttgatactgaattctaactcaagacctgaattttaactcaagaatattccgtcaatattggcccgacgttcagggccacggtggtcccacagctgaggacagctggagcacgctgggctgctcctgcccactgcaattttctataggcacacaggattgagggatttggttccttaaaaggctcgagatcctatcccttctcattcggagactacccagaaaatccctggtcatttatcactgcagtgcactggtgccacactcaattacatttccttccatgtgactgcattaaccagagtggggcactcccagatctgccccatactttctgtgaggtcatactgaacaagcacttcaagaaaatctgactgaatgctccatgaattccattatgaaggcatataaaacaatcatcttgctccatttccttcaggggcaatttcttaaggctacgttttggccagaagtcaataaagacttcatggagcaccgatttactctgcagtgacatcttttggtacattcttacgctcctggaaaatcaaacactctatattccatgacttccccgaatattctgctccatttggtcatcactgattagatgcctaccatgtgccaggcattcccaggaaagcgtatttccatggtggcatatgaataaagccaggtgacaaatgctgtgggcaaggggagcatgcacagagggtccccaaggagtgatgtgggagagcagaggcgacatgggtggtgccacctcagtccctcttcccaaggtgctctcactcacctgaaacttatcctagactttgaaagtctagaatactttcaaaaggacactttcacatcaactcaggcaaatgcaaaagttaaattctccattgtcaacggtggtatcagggctctgggctacccaggatcaaatcccagattcgctcagccctcgccacctttggtaagttatttgatctccatgtactttagttttctcatccataaaatacaataataataacatggtacctagcttgtgcagtggtgatgaagattcaatgagataggtgtaaaatgctcatggtacccagtgatattataataacgcacagtaggatattcttatctacgataatcagagatcctattcatgttgcatccatggcaacctgctgccaccagcacgccatcagcttatcttattaagttgcctattttgttcctcttcatttccacctttgtttgacacacagaacagggactcttccataaacaaaccttttaacttccccttacctccacacgcacaccattgccatcagtattgattgtggtgtccgctgttttcagggtaaaggaacatggggagacaaagaccccaacttgttagaactaacatctaaagcagaaagccagttctctcactttagccaccagaaacctgagaatacacagtaaaatctagcataaaactcaacttggggccaatctgacagaatatttttgagttaaaatttagggtttattgatgtggacactgaaaagtaatccaacctttctggaaaaccatttgacaaaatgcaatcatatttataaagggtccgtagtcttgagagttggtaattccatttggggaaattattcctacattaaaaaagataagttgtataaagatgtttaagtctgctgtttatgacagaaaaaacatgtggggaaatgaagaaacagctaccgttcactcagcagagtgctggtttatcagcaccaagggcagggaagcatgaaaaggcttccagaactgcattgaacttagcatggctgaagtccatggggtagggcagtgtattagtccattctcacactgctatagagaactgcccaatggccaggcacggtggctcatgtctgtaatcccagcactttgggaggctgaggcaggtggatcacttgatgtcaggagttccagaccagcctggccaacatggtgaaacccatctctactaaaaataccaaaaaaaaaaaaaaaaatatatatatatatatatatatatagagagagagagagagagagagagaggcaggcatggtggcaggtgcctataatcacagctactcaggaggctgaggctgaagaatcacttgaactagggaggcggaggttgcagtgagccgagatagtgccactgcactctagcgtgggcgacagagtgagactctgtcccaaaaaagaaaaaaagaactacccgacattgggtagtttataaaggaagaggtttaatcaactcacagttccgcatggctggggaggcctcaggaaccttacaatcatggtggaaggcacccttcacagggtgaaagaagagagaatgagtgccagcaggggaaatgccagacactttataaaaccatcagatctcaggagactcactatcacaagaacagcatgggggaaaccgtccccacgatctgaccacctccacctggtccccacccttgacatgtgggcattatggggattacaattcaagatgagatttcgggtggggacacagcaaaccatatcaggcggggggatcacagggcaggaaatgaataagaaatgaagctggagaggcaggcaggggccagatccattggtggaggaacccggacactgtcccataagaactgtgagactgccagaaggaaggaatgcagccaggctgcgatttgggggaagactgccctgggccgcccagagcctgatgtgaaaggagactggggaaaggagagaacagggaggcagggacagacagccagggtagcaaggagggccaggccagtgaataagagtggaatagcaacacagcggagagtcacaaccacatgaaatgtgggttgtgatcactggaaaaaatttaaagtaaagctgaagtaatgtaagttggatacaatattcattaattatttttctatgaagtttataaaagcctcataactataaatatacatatttatattttaaaatcctgggcttgacctctgcttgtcatctaagatagtgctacccaatatgtgatcagtggggaggggccaacatgtcatgagggaaaaccagaaaaagagaattagcctttaaaacctttaaatttatcagaaaacttgtatgactgttggaactaataagaaaaagctgaccgggtgtggtggctcacacctggaatcccagtgcttcgggaggccaagacagtaggattgcttgggcccaggagttaaagaccagcctgggcaacaagtgagaccccatctctaccaaaattaaacaaacaaacaaacaaaaccagtcaggcatggtggcatgcacctgtgcccagctactggggaagattgcttgagcccaggaagtcaaagtcaacaagtgagccgtgatggtgtcactgcaatctagcctgggcaacagagtgagaccttgtctgaaaaagaaaagaaaaagctaaggcttgtattccatgtctctttttgttccacttcattcttctagtaattcacttttatcatattatgtttatccgttggcaacaggttggaaatttaaacaaaaaccaggtttccctggtagatagtttgagaagtgctaactaaagacatcacattcctgctgggctttcagggcttggcagtgcacagagggcagcctgctccagctcacactctgtggcaatgtcacctatcctatcccgtgccctcaaatgggggctactgctccactgacacgctggttgggaaggtgagggcgctgcagctgaaacagctgtattacacaggagtacagccataactgaggaagatgcttctttaataaccacttatatgagtgtgtgtgtatatgtattgaacaaactgttcaacagatgggaaaacatggcctacacaagaaatggtgccactacatagccccagaactctttcctgaccaacacattcattttttgtcattttaaaatgcagtattaggtgaattcaatgagcctccttctatgtgtgctcggcaaaatgtgtggcttacataactagcacaaagagctggtataccttgtgatataatacacttcacagtatctcttccccagcgaccatgtatacacatttgcctgaagctctgcaagggcggagctcacacctgggttttgctccccaatgtgtgtgtgttcgtgtgaaccatctaccaggtgtcggggctggagactacgttcacgcaggaacactttccgtcacctgctgaacctgctacgtctctggaatgtactacacaacagtacagcagaagtggagatatttctggcctaagggaaaggggcactatttcagagctgcataaagatgaaatgggctgtctagggacagaggaagctgccttttcctgcgagtaggtagaggccgggcaaccatgtggcatgtggctgggcagtccagccccagagtggattgcttctgggcaaatgactcccagagtcttctcctaatccagggtctccaaattctgtgcgaaccccagacccactcaatattccaggactagggtctgtggcaggttacccttcctgaacaaatggccactaacattccctgagtccacatggctgaaagttacacttcatggcaacaaactgtaaataaaatatgttccattttccttccttgaaaacaaatgtggtcacagtgacctggaaggccacattcaaatttaggattctcagctccctggagtccctcactggaatggacaaagaatggagagtgggaccaggcctcacctgaagacccaggccttacctgaaaaaaaggggcagaggaggggtcagaagcacaccaagcaaactcacttcactgttctctgacctgatggtttttgtgttggtccctgctgtgttgctctcagggaatacctgagactgtgtaatgtataaagaaaagaggtttacttagctcatggttctgcaggctgtacaagcacgcaccagctctgctcggcttctggtgtggcctcaggaagcttctactcatggtggaaggtgaagggggagcaggcgtgtcacatggcaagagaaagagcgagagaggaggaggtgccaggctcctttaaccaaccagctcttctgtgaactcatagagtaagaactcaactcactactgcaagaacagcacccagccgttcatgagggatctacccccttgacccaaacatctcccaccaggcctccctgcaacactggggatcacatttgaacatgacatttggaggggacaaacatccaaactacaccagctttaaactaacaaacttgatcaatggtactgctttgcctcccacctccccaccccctaaatcctgctgtggttctatgtaaaatttcaaaatttgtgtagacacaaacaaaatgcttcaaagtaagaaaggtacaagtaatttccactaaaaagaaacccccgaggctgggcgcggtggctcacgcctgtaatcccagcactttgggaggccaaggcgggaggatcaggaggtcaggagaatcgagaccatccaggctaacatggtgaaaccctatctctattaaaaatacaaaaaattagccgagcgtggggggcacatgcctgtagtcccagctactcgggagactctggaatgtactacacaacactgcagcagaagtggaaatatttctggcctaagggaaaggggcaggagaattgcttgaacccaggaggcggaggttgcagtgagccgagatcaagccactgcaccccagcctggaagacagagtgagactccatctcaaaaaaaaaaaaaaaagaaagaaactcctgaatacttcgaaagttgagaacacaagctctaagaggcatacttctgttagaaaaaaaatatttcaccactcatgctaatctgaaatctattttcaaattcagaacttcggtctagttactgactgggaaggtgccaaggttctacctacacctaagaagtccctagcagcacgggcgccactggaatttcccacttgtcgctgctgttgatgcaaggaaatcgcaacataagaggaaaatggggttggagccacgaggcttgcttttgccacttatcttccagagttcattctgctacatggacagaagataactggagtgaaatagatatttccctatgttccttctgcatttggttggtcaatgtcaaagtaaggaccaaattccatctgatagctaagcgcacagaaggggctcggctctgggagcagtgagggtgttggcggatctgtatggcaatactcttaagacagcttccaccaggatgtgagcctcctgcttgggacctctgccccagctttcatagcatgccatggtccctttagaaggaagcccgaagtgcacattgaaagctgacctctgcttcattcagcactgcagctgcctggggccacttccactgacctcatcagcccctacaatcggaattcagccttgaaatctagacacttttttgtgctcatgttagaaaaaggaactaaaagtgctctacctttgatgcaaatctcccccctgcctcccacaaatccaacacaggaccttgctatatataattagatgagctggcaagagcttgacctcaaatgtttttttaacttttcagttaactttgagaatttggttttccaacttcacaatgaagtgagcttgtaactttgagtctagaaagtgtgtttgttggcgagatggcagcgatgcccggagtcacggtgtgtttgtgccaccttggttccctgtgtttacagcagaatgagctcttagagggctctccttacatccactggaggaattgcatgctaatcatacgtgaaggaggtctttaagaagaaaggagccttgcttctctgaggaatcatactcatgaattgctggggcagaaccagcaggcagcgtgcacttgggcctgctttccagtagctctgagaaggcccagagccatttcaagtctgatttcatttcatcccttttttcttcaatgtcttcctttctgcaagatctttcttagtgtattagtctgttttcacgttgctgataaagatatacccaagactgggaagaaaaagaagtttaattggacttacagttccacatggctggggaggcctcagaatcatggtgagagacaaaaggtgcttcttacatggcggcggcaaaggaaaatgaggaagaaacaaaagtgaaacctctgataaacccatcagatcttgtgagacttattcactaccatgagaaaagcatgggggacaccgcccccaggattcaaatgatctcccaccaggtccctcccacaacatgtgggaattatgggagtacaattcaataggagatttgagtggggacaaagagccaaaccatatcacttagtgtgtaaattttagagtagcctctgagcagtattatttagtcacactataggttgcataggtttctgtgggcttgagaatacagtattgtctctgtggaaaatgccttccagcactaaacagcaagtgcagagagagaatttttttagactatagcttatttttgaagttggaagaattgctatataggaatcaccataaatcctaaaagactgggcctcaaataagagcttttttcttttatctcaaaataatttaatacaaatactaacaaacgcacctttcttccatggtgatgttttatgtgttaccatatcctagattagaaacccacttatgatagcatctatgagctcagacagaaaggcagggcctgtccttcctccacctgcctaccctggagtcactgccagaggctaaggtggagaaatcactgtggcagagctttcaggatggagtgcctgatgggatacaggggaggaacaactggagagaaaaggaaggaaaaggaaggaaaaagcgactcacaatttaagcacatcctgtgtgccagcaactgtgctaggtgtttatatatatcatcttaaatttcttatcttggctctgaggtaggtgttatttacattttacagatgaggaaataatctcatgtcataatctcaaacaataaagaattcaagactttgcccagggacactgattaattccttcccggatccagtctttgaatgcagagaccacagggctcacaagatccactcaaggggcttcgggtggggtttggtagaggcaaaggggctggaggaagggaggtgaaggtagtggtgggcctgcccatggcttcttctggaagctggtggcacagcccaactacagactaaagttgaaggacagacgggagggcccaggcccaagctccctggggtagctgaaggaccctaaatccctatataaatgcagtgttcaataagtgtagtaactgtagagattttttttaaaaaccatccagtctagaaaattctagatagtgaaaaagggcctttcctttctaaagatgtagaggttaaaaactgttataggtaaaatatgatctggagaaaataagagaactagacaagtaagggaataataattaagaaaaaagaaagaaggagctttttaagcacaaggattctcaaaaagactagagtgatttgcttctgcatatagctttcgttacttaccagtggtgtaagaggtctggtaaatatggaaaaaacatcctaagaacaggatgtaaatgacaacctcttaggcaatatgagttaagattataaagcagcatgactgacgtcttgaattagtggtctaccactgaaacacgtggagcatgttttccacatatccatgctgagtggctcaaaactctttttgccttcatctagaacacttttttctgctgatacatctctgtcttgtgatgatagtggactcttttttttttttttttggaacactcaaaaccaaaatatgatacatgaagtgcacaatcaacccagtaacactacgataaaccaaaaatagaatgtgaccagaatccacatctaattttctcaagtgaacttgctccaaatacaatttaaaagagctacaaactgcttttagcacagtgctagaatatcctttttttatagaaatttacatgacttaggataaaatatattttttaaaaaattctttccccaatcattgactcaagcaagttgcaaactttaacaaaaattcacaaaaattaaccatgatgaagaagagtaaaaaggatctgttcttagaggggagttcctttataaacaaatgaaacatgtggccaggtgtggtggctcaaccctgtaatcccagcactttgggaggccgaggcaggcagatcacctgaagtcgggagttcgagaccagcctgaccaacatggagaaacctcatctctactaaaaatacaaaattagccgggcatggtgatgcatgcctataatcccagctactcgagaggctgaggcaggagaatcacttgaacccgggaggcggaggttgtggtgagccgagatcgtaccattgcactccagcctgggcaacaagagcgaaactccatctccaaaaataaataaatacataaataaaataaatgtaacatgtttaaatttgtcacattatttagttttctgacatacttgcaaaattatcctgaaaaaaagttaccacttaaaatcaattaaatacattttacaaaatttaaacttgtatctacctcttcaacagaagtattgtgttaaaatattaatgtatttttaattaaagagagcaaatttccctaacagtgtcaatcagtttgttttaaattagaactgtacacagaatacagataaaattttttttgagacagggtctcactctgttgccccagctggggtgcagtggtacaaacatggctcactgtagtgttacttcccaggctcgggtgatcctcccacctcagcctcctgagtagctgggactacaggtgtgtgccaccatgcctggctaattttttgtgaatatggggtttcagcatgttgctcaggctggtctcgaactcctgggctcaagcaaccctctcgcctcggcctcccaaagtgctgggattacaggtgtgagccactgtgcctgccagataaaaatttttaatgatattaaaaccatttagacaatttacttattgttgtaaattacaacaaatgcttttacttgcatgcctatcaaagacctaatttaatcaccactagtgtaattggtttaccaagaaactgtggaaaatgatcatcctatttcaagaagagctcccttttatcattaaggagacacagtacccagttgttccaaagacggtaggatggaaaatctgcagaattcaccttcaccttctctgaagcaaacacagaaaatcagtgggaccagaatacaaacagttaacccactatggcccagggatttcgcaagaggtcaaggtaaaaagtcctcgaattaaaaattccaggagatggctccctctgcccaatgaggactaggttgtccgagggctggactcatccacatgccttttgggtcccggacccactgcttctccagtggcaggcagaagatcacagaatactggaggcgcctgtagctccgacaccatgtgccctctttctggctcagttccattaactgtaaaataagggacatcctggggctggtggaggtggcacagggggtgactaggagctaatcagggggccccagggtggacccctacttcatgaggggctgctccactttgctgttttatgtgttggagttcagtgaaagaattcacttataaagatctgacattcagaacaacaacaacaaaataaaatgaaactgtttcaaaaccactgagcttgaccatctctaaggtttcttccagtctcaacattctaaagtccatgaaaaagggtgaatttggctgtattagtccggtctcacactgctacaaagaactacccaagactgggtaatttatgaagaaaagaggttgaatggactcacggttccacaggctgtacaggaagcatggctggaaaggtctcaggaaatgtataatcatggcagaagggcaaaagagaagcaagcatgtcttcacatgacagcaggagagagacagtgaaaggggagatgctatacactcttaaacaaccagatctcaaaagaactcattatcacaagaatagcaaggggggaatctacccccatgatccagtcacctcccaccaggcccaacactggggattacaattcaacatgagatttggatggggacacagagccaaaccatatccttggcttatctggactctcctcctagatccaagcaaatgtcagctaaaaattctgcatgcaagatgaaattattctcttgggtgaaatgttggttttacaacagtgatcaaaggatgctttttgaaaactgacttgatgtaaatggatagatttttagcagagaccattctgggaccaaaagttcccaacatcctttttttctcggttcttcttgggacacattttggcatggtaatggtgaatggggcagggagacacagacagactaagtcacaaacatggaaaaaggattatttagctaatcttttgtattaaccatcactgatggaaatattttgccttcactgagttccctcatcaatgtcctgttaccatgcttgccttgccaaatttcaaccctgctcctgctcataggttccaataatcgaacattacaaaaccaggccaactggtcccactacaaatgcagataggtcttcaaggctctgggtcaaactgccagtcaccacttttttcctctgtacatgtttcacaccttcttatgaccccaagtcttcagtctaagtaggtgacctcaacttccactttataaaactagcaaggccaagtgactcgagttcactgctcccctgtgtgctacaacatgttcctgcatctggactctttcttggtcctttctctggtatgtcaataaggagcattcctcttcctcccaaagataatgccatcttttgttccctcaattctgcatcttcctgcctcctccaaggccttgcttcattttataatcatgcctacttgtaatttttgttgtcgctgttacaatatacattgcttttctaattagaaaaccgtcaaaattatacgtgtcatgaaaacatataaaggaggaaaatataagacatacagagttcctatttaggaggcccagcattactaggaggcccagaaagaacagaaatcaaagggcagagcttaaggaacgctacaaaaatcctcaggttctaaagaagatgaattttccaatggaagggactcaccaaatgaagcctactatgaatacagacccatgtgaagacacatccacaaagcatttcagaatatccaagacaaagaaggatgtttcaagagagacaaaaaatcagtcatttgcaagggagtggaagttggactgacatcagtctttgcatcagctaaattggacactataagccaatgagctttcctagaagttctgagaaacaatgtccactggagaagtctacctgcagataagctatcaatcaagcgtgagggtgagatactacgtatattttcaagaaatcagacaactgacttttcattctcttttctaggggagaaaatataaatgtagtccagcaaaatgatggcataaaccataaaggagaaagacatgagatttaggatgcactagacccaacttagggacagagcgaagaagagcccccagaaggtagatcagcctcaggtcctgggaaaagccagtccagaataggaaacgtgaataatagaatgtttgtcataactgagaagatacaagaacttgaggatctgataaagcacacaatgcgtcaaaaaaagataatacaaactctaagaaaaataaaaatgccattcaagaaagtcagatccaaatatgaagtaaaacgtgacatgaaatgattttcagcagttgtttgagtgtaaacacggagtgtctgtctgcttccgcggctgagcacgttctcctcgggtgcctcccgcgtcagaagctagacctactcagaaggaacgtaatcctcaccagctgcttagctggcatcgaagaacatttttatagctgtattagcataaaccgtactgacaacttttcaggttttagcgtcaaattatgaataaaacatggacaatggttacggcatcaagtgttaatcacctaaatgtcaacgcatggctgatggaggcagaactgcacgggcagatgggaatcaagaagaaatgggaggaaactcacaactgcaaaatgtgagggcatctgctaaaactagttcatctacatcaaatgtttgcgaacagcacccgtgggtcactctctaccacatctggtcctggggtttctcagaggatgtggtcaggagcctctgtctgcacagctacctggcctttcttcaggatccgagcctgcacagtgtgcatcacagggctccatgggagcacaaacacagttcaccttctccccatctggagcggctatgctcatttgctagtagcagcatttcccacttccctcctttcctccttctcttcctccttccctcttgcctctcctacttactgagcttctagcgtatgccaagcactatggctgagacggtcttattctcaaggcgagcccactgaaaggaggtcaaacctacagcccggagaattgatgactaggggtgagaaagaagcttatgcaaagttaaagtgttttttatttcatttagatgtatatttttagagacaagctctcactctgtcacccaggttggagtgcagtgttacgatcatggctcactgcagcctcaacctcccgggctcaaacaatctgcccacctcagcctcccaagcaactggggttacaggtgtgtgccaccgtgccaggtgaaagtgtttttcaaaaggcatttaacataggaagattggtgactggacttcctaagcgcagttccattaacagcaacgacacgtgcaaaatgagctcctgtagctgaacctcagaagaagagacgagacagcggtgtgttaagggaccactagtgaccccaaaaggtgtcatttaatcctcaggacagccctgaggtaggcattattttacaaatgaggaaataaactcaaagaatttggacaggcccaacttaggtctgtctagcactagagtctgggttccttccatcacactgcatgggatccttaactctgagtgagccagggtcctgtggaattctccaaaactgctgtgccctataatatggtgactggaggggaagaaatgcaggaaagcttgtggaaaatttttattcatacccaacagctcaacaatgtagtttaccttagatgatccctaaggaaccacccagtgacatcattctctgattccataattgtccaacaagttcctccttctatttcccaataaaagcacagggttttgcattacctttgtcagataagtgcaataaacaagtcacagagctctgcaggttcgtacctgcaccacccctctctggaggctgtgtcctctacccgagctgttcttttctggcaataagagttggggcccctccaacggcagggatctggacagcttccagaggaacccaggacaagagaaaaagagccccagggacactgtccaactcggacacaaacccaagtgtggggtgggtggctgtgacacgttccaggcttgatggtatttttccctttactttaaatcagtctttgattgtcttgtgtgcacacaggaagaatgatgaatattaaaaataaaacgcaaatcagccagcaagtagtctttagaagaaataagtcacaggaggttgaaaacaatgtactagcactggagaagtctgaacattttggtcaatgtctgtgaatgtttcaaagtttaaactggatggagtttactgagactctaatcaccgctcagcaagaaatctatgctaatcacatcaatattataacacaaacaagcaggtggaagaaaatccaaagatagctaatggataatactttgtctttggttcaattataggacttggtttctaaaggagctgctaactcattcattcactcatcaaacatgtattgatcacatataacatggcaatgactgtgctaggagctggcaatactaaaattgtttcttcattccagaacatcagagattagttgggaacagagtcaccctctactgagaaaaggccatcagaaggccggcaggggtcagctccatggagaagaggtctggggcatcccaggcggaggcaactgcagtttccatcctacggtgccctgtgtcctgggaacctcaggtagttgagcaccactgcactaatgagctgagtgagggagaagcaagagctgagacacaacagggtccaaatgagaggccttattcacaaagtaaggattttgaacattaccttatgaacaacagataagtactgaagagtatctagaaacaggatagtgagatgatgacatacataggtttttagaaaaatcgcttgggccagtcatggtggcacgtgcctataatcccagcactttgagaggtggaggtgggtggatcctttgagcccaggagtttgagatcagcctgggcaacatggtgaaaccctgtctctacaaaaaaatacaaaaattggtcaggcatggtggtgtgcgcctgtagtcccagctacttgggaggctgaggtgggaggatcacttgagtccaggtggtagaggctacagtgagctgtgatcatgccactgcattccagcctgagtgacagagccagaccctgtctcaaaaacaaacaaacaaacaaacaaaagatcactcagggagcactagagggccactgaagagtgccggagaggaatcagaataccaggtaggagctgctgcgtactccaggcaggagtgttacatgaaagtgactgaaccaaggcagttatcctgagcacgggagagtggaagcaggctgaaacatcactgcttaggtgtgaaatctataaaacctttggctaatatgtaggagtgagagggaaggtgccaacaatatctccccactttctagcacaaacagtggagtggatgggagaggacaaaagaggggcagcaagttcaggaacagatcaaggctcagcttcggacacagtgtgaaaagtctgcggcatgaccgaggggacagcctgctggaaagtcagacagccaggtctggagccctgcagaggggtgtggactgtcagcccactgactattagaagtacagggaccaataagatgaggaaactgagggcaccaaggtcacacagtccagaggacaaccagcatgaaggccacatgcaaaaacacaaaagagcaagaggtgcgttagggaatgtaagatcttatattctccttgaccctcgtatctctgagagcttaccttatgattcttctcccctcacctgcaaatatatagcttgagtagcagatgaggcaggacatcataacgccctccatattaaatgagttccgtgaatagacaggatccagaaaataaacccatctgtttgatgcagaactaagaacattagattgagaaacttgaggtctcctgctgtaagcagccatcagccagcatcagccagatcccctaggaatctgcatcagaacaaactacctattcttatcatctctccactgggcctggtcatctgtgagcagggttcccaggcaggtgattgtcacagggcggcagatcagaacagacagactagttccagaccagggtcaattcctggtgtctgctctggtcttggtggccccactctgggccctgggggaatggacctgcccagggaggaagagaggctttgcagatggccctttgctaagggctctggaagaatctcctgaactttgtgggttctctaagacacccgccctgacaagagtgcctttccaagagtgcagggcatgttaccaagtgttaccagaagtggtctcggttgctctaaatacagcgcccaacagagtgggtcctcctggccactcggttgggctgtggtcacaccatgcctgggaagagcgtagctgggtttcccatcccgactccaacagtgacagatttgtgtgactccaggcaaggtcatctaccctttgggcccctggttcctcacctgaataacaacacatacaacaaacagacaaacaaaaacaagccaacaaaaaaaaggacttgcatccagtgattctcaaatgtggggtccctcaaaggtttttaggccagttgtttaggaactgcttggaagagttgttaaaaatgcgatgttatggccgggcgcggtggctcatgcctgtaatcctagcaccttgggaggctgaggtgggcagatcacttgagctcaggagtatgagaccaacctgggcaacatggcaaaacctagtttctaccaaaaatacaaaaaattagccaggtacggtggtgcatgcctgtagtcccagctacttgggaggctggaggctggggtgagaagatcacttgggcctggtaggcagaggctgcagtgagctgagattgcgccactgcactccagcctgggtgacacagcgagagtcccaccccccaaaaatgcaatgttaaagataaagggtccagatctttgaccccaggccttgggtagcaccagggcatctgaatttttaataagctctataggtgattctgataaacagctagatttgggacccactggactaaatgattactaagctgccttccatctctagcaatgtatgactcaatgcatgtatgtgacaaatgttcatgaccaattcaacaaccaggtcccaaaacctaacctagtacagttgcatcactcagacattacttatgcttgctaatgaatcactcttaggctttatagaaaatagagtaaaatgaattattcgagagtctcaaaatagaccccagtctcccatttccttcaaattacattttctaaaactgaaacacagtaccagccacaacccagtcctcagaagaggagagcgacaggttggcaggtccagagccatgagccaggccactggtttgcagttgtgaccttgagcagaagaatatttttttctttaaaattgcctttccactctgtaaaatagaaataaccactgctaacctatctcctagggctgctgagaatccacagggaaattactatccgtctgattctcccactaacacccggtgtcagagaacagaggggaaagtgtcacagtgcattactttcagacccaccgtgtctgcacaaatatttcaatggttcaaaataaaaaagagcccaaccaaggattcccagtgagaatggaagaggccctgtttgatttactttcctgggaagtcaagcccagctttagagcatcaggaaccatcttatctacccccgggtatgctagagacagaggccggcctgcacagcctggtcagcagttgcaactttctttagctaaacctgctggcattcaggcctgatagtaggcagggtcagcgcaaatggaaagaatgacagtgtgtccttccaccttcctgaggccctggctgatatggaaactggctggcacgggtggccatggaaagtatgaatccaggcttgcctagggttgaatgagtgaggaatgatcagatcaggcctgtgttaaaatatcaccacagctcacttgcccggctattatccagtcacgtcctccgggtttcaggaatgagatgctgcaacccgaagcagctggagacagtgtttgcaaaagcaggccaggcaggctccttggagctgaagctgggtggagagatgggtgtggtgactgcctgcacagacagacacctgtgaagggctgacttggctcccggatgctttctctacagttcctcacctttgtgcatggctcaccatgatctccgccccactctatagatgaaggaatccttcctagagaggtcaagtgtctggctggtgcttgcacgaagaagggacccaaatccaggaccctgtgatatccctcctggccttgcaaactttctagcacctggctgtctcgtgcacctacgtatgcacatggatgctgtaaatcaaggcaaagcacaggcaggcaggcaacacaggggaggtctatggaaaaggaggggtgagaaggaagaagagagttttaggccaaaagctcaaaaatgttctttagacaagcactaggagaaccacccagaagtcacgagtcgggagttctaagtccttgtggagatggacccaccgttgtctcagagatgccttagtctctacagggaaaaccactgaaaatgccttctagactggaaagtctaaataactaaaatgttttcacttctctaataacttttttttttaaggtcttagaatggaaagatccctattccaacgtcccaaccaaatcaagatgctgtttctagggtccaatccctattccaacatcccagccaaatcaagacgctgtttgtagggtccaaactgcctctgcttaggcagttctcagactgggtagagaaaggaagactacaagttaaggagtattcaaaaacaaaacaaaatgagtatctcagagagctgaaaaatgaattgctgttgcccccaaagaccctttcagtctgaggaagtattattcatgcccctctgccctcatacctgaaaagccccctcaaatcaaagatgaggaataagaggaagaagaaggaggaggaggaaacagaataaatcccctgctccacgtctctggttatggcagtcaagcaagcctaaaagaaaaacagccatcattcccagggtcaatgccagtgtatatgaggaaaaaaaatcactaaaaatgtaaagcctccattgcctacaggccctaaaaatattacacactatcagggcactttgcatgaaagttttaataccgttattcatgaaaaaaatctttgaaaaaaaggcagcccaggaagtggctggcctacatgtggaccaaaaggcaggctgagaagcgtgtctcccacgggctctacagtactcttgcaaagcaactgcctctccatttaggtcgcagaattggggactagccttgttagtgacctcccaactctaaatttgctatcaaaatgccaacagggccgatctctttcaagccagacgagtcatctacccttgtgggtagcttctcaactcatcatccaaggcaaggtgtattctgggcacgaggtaggggaagatgcaagtttctcccgggggttgctttggacctaaagaggggtctatgctcattaccaaaggcagtctgcccagcataacctttgacaccacggactcacttgagccacagaatgtcatttatcaatttaatacatattcatgaagcaagtgctattcttaggtactaagaacttccaagctcctaaggtactgggcacctagtggtaaatgagacaaaagccttcgtgaagctgacgttctagcaaacacagacaacaggcaattatataccctgatgttggggagtgaccagtgctatgaagacactttgaggacagatggtctggggtggggggaatggtgcgctcgcttagctaggggctcgggaagacatttctgaggaaggagcatctgggcagcgacctgggaggagtgagggagtaagccatgtgggtatctgggggaagaaccttccgggaattccaggctttgaggaagggaccacacttggcacatgggagcagtagcagcaaggccagagtagcccagctgtggtattggagacgcgaggaggagctgaatctggagagggcagagcgggccacgtcctcacatgcccaggcaagcatctggagcccgcgctaaatgtgctcagaggactcagagcaagagagtggccaggtttgattcatgttttcaaaacaccactggctgctccattgagaggcagagctccagagtgacaagagggaagcaagaatggggaggcttccgcgataacacaggcaggggaggacactggtttagacaggggtgagagagggagggtaaaaagcagaggagcccagaacatcatctgaagaggcacccaggactggctgctgggttggctgtgcggtgtggagatggaggctgatgccattctaaagagtgtcagagagagagagagagcctcttgctggttgttttaggaacaacagtgttggctaataaattcctgcagacactctgaatataactgagagagctcagctggctctaacagcattatggactgaactatgttcatgtccttcactccccacaagtttatgtgttgaagccctaaccatcagtaccgtagaactggactacacagttggcgatagggcctttttttttttttttttttgagacagtttcactcttgtcgcccaggctagagtgcagtggtgcaatctcagctcactgcaacctctgcctcctgggttcagcgattctccttcctcagcctcccaagtagctgggattacagttaggtgccaccatgcctggctaattttgtatttttagtagagacagggtttcaccatgttggtcaggctggtctcaaacgcctggcctcaggtgatccacccacctcagctggagatagggcctttaaagaggcaattaagttaaaatgaggtcatgagggtggggccccaatctaatctgatcggtgtctttgtaagaggagagaatgtggacacataaagggacactaggcatgtgcgtgcacagagggaagaccatgtgaggacacagggagaaggcagccgtctacaagccaaggagagaggcctcaggaggagccaaagctgccggcaccatgatctcggacttccagcctccagaactgtgagagaaaaaaggtctgtcgtttaagcccccaatctgtggtattatgttagagctgccctagcacactgatagagatagcctcaattttgctttgaattgctatgagttgacaaagttaaccacaagttagagaccccatgaccatatcagccactgcagagacctgaaggctgaccactgaaaaaactacaccctcctatatcacacacacacacatacacacacacacaatttattattacacacacatacacacatatttgttattgattataatcataaagtctaactatgagtttctgtttactcccaattaacttggaacaacttttctttgagcctcctcctgaatggaataagggaatggttgttcctgctcctacttggattcctgaagataggactggccaaggacagcctggaacaatcacagcctgctgctgtcatcgtgcaacaatttgttgcctgtattctagacgcagaaaaatctcacagcttatttcaagtaatctctattaatatccctccctggccctcaaaagatattaagaatccaaagggaaatcagaaactcaattgtgctagaaatagccaaactgtctcattcagaatgcattcaccaaacaacttcaaagcaaaatgatgatgaaaaataagccttccaacaccagagtatttctctttttgaatgtttctaccacatctaagaaaacagatgtcaccatggttaaaaaaaaaattgtaccttgcaaaaataaaacttcataatgatagttcgttcttgtgaataaatcctcaaatacatccctcttgcaaaaaaggttttctcttactgaccactcttcttccatcactgactgcagtggaaaattacattccactgtgaaatataatcctgttgatagtaacacctattgaggttttcatcaaattgctagatgagatggtgtaattagggacagccagggggaaaactacaaaggacacagaggacgtcagtccaaaggaggtaaaaactgaaaagataataccttcctcaaaccattgcagaagcgtgtacctgcttgcctggtgacaaagtctttttgaaaatcaacctgtacccataattctgctttctgactttcaccagaggattcataagagcatcctgaatccaaataacaaaattaaatatacactaaccacccgtccttaatcgcttcatgtaaatctgtggcattagaaactgaaaacaaaaattatctgagggtcatgttttgctatgcatttaatggatattacttctgcctgctccaagggcaatgttcagtttccacaaacagtgtagtttattatgaaaaataatttataaatcattcttgtttaaaacaaaatttttttaggagaattagtaacagaatttcaaaaaagttgaataatttctaaagattaagatttcaacttcactcttttaatgtatttaaggtaataatcacttactttggtgattatttataacattaacagctctaagaggcctttaagggccattttgttatacaaaaaagaaacacatttataagcattcttagaataatgctaatgtcattagctacagaagcagcacatgctaagatatcagctttaattttaaattcatattagaccttaataaaataagtcaaggatgcattttgtaatatctagaataaccactaaaagaacagtaatgtctaacaggcaagttagtagagggggaaaatgaaacaatttttaaaaatacataattcaggccaggcgcagtggctcacacctgtaatcccagcactttcggaggccgaggtgggcggatcacaaggtcaggagatcaagaccatcctggctaacacggtgaaatcccgtctccactaaaaacacaaaaaattagccgggcatggtggcgggcacctgtagtcccagctactcgggaggctgaggcaggagaatggtgtgaacccaggaggcggagcttgcagtgagccgagattgtgccactgcactccagcctgggtgacagagcgagactccatctcaaaaaaaaaaaaaaaaaaaaaacataattcaaaggaagataagaaagaaaaggaatatagaacaagtagaacaaacagaaaacaaacagtaagatgacaggaaatagaaggatggaaaaatgtgctataaaaatactaaccaaacaagagctggcacatcatgcaaaatagactttaagacaagaagcattactagcaaaaaagatggacatttaataataaaaaagggtcaatttgccaggctgatacaacaatcctaaatctgtatatatccaataatatagcctcaaatctatatgaaggaaaagctagcaggacaaaaaggagaaatcagcaaatccaaatcatggtgggaaattttaacacacttctctcagccactgataagaatagacgaaattcagtaaggccatagatgacataaacaatacgaataacaaacttaacccaactgtctatatacgttgttgttacatgactgcatctatatatgttgttgttaagaaggcatattttttcaagtgcacatgaaacacttatcaaaaccgacttactgttgagctacaaagcaagtctgaaaaaatgtcaaaggactgagagtgttttctgatcacataatggaattactctaggaatcaataacattaaaaaaaaaaccccaaatgtttatgaacaaagtgatacatttctaaacaatctacagatcaatgaagaaattatactggaaatcagaaaatatcctgaattggaaaataataaggatatgacatatcaaaacttgtaagatgcagcaaaagccatacttagaggtaaatttctagtcttatgtgaatatatgggataagaagactaaaaattaatgatttacatattgatcttaaaaagcaagaaaacagaacaagagattaaagaaagtagaaggagaaaaggacaggcgcagtggctcacacctgtaaccccagcactttgggaggccgagatgggtggatcacttaagatcaggagttcatgaccagcctggccaacatggcgaaaccctgtctctactaaaaatacaaaaaattagccaggcatggtggcaggctcctgtattccaagctacttgggaggctgaggcaggagaattgcttgaacccaggagacagaggttgcagtgagttgagatcgcaccattgcactccagcctgagcaacaagagtgaaactccgtttaaaaaaataaaaaaaaaagtagaagaaaaaaagtggaaaacactgaaacagaaaacaaaaaaacagaaattaagtcaaatgttgacttttcaaaatattaatacatttaataaacctctgacaggactgatgaagaaaagagcacaaattgtcactaccaggattgaaaaaggaaacataactacaggtcctacagatattagaaagcctatataaatattatgccaatatatttaagattttaagtaaaatggactacttcctagaaaaatacaacttacaaaaatgacagaagagaaaatcaattggttctatatctatttataaaactgaatatttaattaaaaacattctcaaaagaaaactctacacccagatatctttatcagtgaaatctcccaaacacttaagaaataatatgaatcctacatcaactcttcaatacaggaaacaaaaggaggggccctttctacttattttatgcttttagcataaccttgatcctgaaacctgagaaaaatattataaaaaagaaaagtgatcagcctatatctttcatgaacataaacataaaattacaaaatgaaaataatagtaaaacaaagccagagtcataaaaaagaatactgtactataaccaaggaaaagtgaatatatatatgttaaaatacatgtaggagattgttactgcagcattatcataatactcccaactggaaaagtcaaatggaaatgtgatatattcacaccacagaatagaaacaacaataaaagtgaactactatgacatgtataatggttaattttatgtgtgaacttggctgggccatggtgcccagataccagatatatggacaaacattattctggatgtttctgtgcaggtgttttgagatgcgattaacatttagattagtgaactctgagtaaagtatattggcagggagctcatccaatcagttaaaggccttaacggaacaaaaagactagcctaccccaagaaagaaggaatctgcagcagaaatcctttacacttgaactgtaacatcagttcattcctgggtctccagcctgtcaacccaccctggagattttggacttgccagtcactataattgtatgagccaatttcttaaaacaaacttttccctatatacatatacatcctattggttctatttctctggagaacgctgtagtcaataagcatttcataaacataatgttgaacaaaagaaacaagacacaaatgatgaaaaacatgcttccacttatataaagttccagacaagcaaaactcctctatggtgatggaggtcagcatggtgggtaacttggtgggccatggtggtgactggtgagtaatagctggggagggacatgaaggatgcttccaggtgtgctggcattgttctatttcttgacctgatatgggtgtgtttattttgtaaaatttcagcaaggttttgatttgtgtatttttctgtatgtatgttatacttcaattagaaaagtatagctttttattgattatacctcatagccattaggatggctagtatcaaaaacagaaaataacaagagttggcaaggaggtagagaaatcagaactgttgtgcactattgatgaaaatgtaaaatggtgtagccactgtgcagaacggaatggcagctcctcaaaaaattgaaaatagaattaccacatgatccagcaattccacctctgtgtatgtatctaaaagaattgaaagcagggtcctgacgagatatgctcaatcatgtccacagcagcatccttcaaaatagccaagatggcagcaaccccagtgtagatcaatgggaaaatgaataaacaaaatgtagtccatccatacagtagaatattattcaaccttaaaaaggaaggaaattttgaaacatgtacaatatagatgaaccttcaggacattatgctaagtgaggtaagccagtcatgaaaaaacaaatacttagaaacctaaagtagtcaaattcatagacacagaaagtagaatggtggttgccaggggctgagggaagagaaaatggggagttgatgtttgacggatacagagtttcagttgtacaagatgaaaagtgttctggagatgtgctacacaacaatgtgaatatatttaatatttaatacctctgaactgtacatgtaaagatggtaaattttaagttatgtgcattttaccacaatttttaaaagtttagtaaagaaaaaaatcaaagcataataaagattgtattcatactttggatcatacaaaggatcaagaagaacatatttaattgtagatccattaaatggggtctcccactgcttttcattaggcttcagttgtgaaaaagctttgtggatagcaaagtgctaaaactggaaggctttttaaactctgatcttactactatctttacaggattggtaattaaagttttaagaaggagatataggtaaaggatgctaattttcctggaaaaggacatgatcgttgaaaaaataagagaagatttagagcagttcagaagatgtggtggttaattgcgtgtgtcaaactggccccggtgtgtgcagactgagcattatctctggaagtacctgtgcgggtgtttctggatgagatcagcatttgaattggtggactctacaaggtagactgcccttcccaatgtgggtgggcatcatctaatctgctgggggcctgaagagaacaaaaggcaggagaacaaaaggggggagtctgcccccttttcctgcccgcctgcctgagctgggacagctcatctcatcttctcccaccctcgggctgggatttataccaccagctgccgtggttctcaggcctttggactagccagtctcaagtctccagcctgcagatggcagactgtgggacttctcagcctccataattatgtaagccacatcctcatgataaatttctttatatatctatatacacatctaccgctatgtctatcctattggttctgtttccctggagaaccctgattgatgcagaagactactgaatattcttcaatacccatttccctttgatcattaccttctgttcacactggcttcctgtgttagcacaccacagtctgtctgccagaggcccttgtgccaaccatttcctctgcctggaccttaccagagaggtccagaccacccccttctgagctgagtttaaaaatcatatcctcagagcggccctccagggccccatcagcacctcccattattgtttaccacagcccccatgtgcttaattccagcagcaatcgcaatctaataaactaaaaaaatagtatctgtctctcccatgaaaatgtgcactccacgagagcaaagatattgctttgttttcccctgggtccaggtacattgccagaacaattcaataaatatttgttgaatgaacaaatgaatacataaatgaatatataatgagcacacctcataggatactaactttattactctgatctagaaggtaataagaactggagacctacaggcaaaaaaactgtcctgaatttcctttctacactgcatctcctgaagtgagtgttttctccacattatcctgacatatattttttcatcctcctcccatcccagcacctgctcagcacctggtgcccttactgggtctgacattccaggatgctgtgctttttttacacagcatttccccctgctggggccagggactgagaaaggctgatctgtcagatccttgatggcccctgagtgcagggcttcaggatgagattacaagaggactagaagacaggcttcctatatctgagaagcgtggaatctcatggatacacacagctatgtcatagttgaaatattaagtttatctacagaattatagctgtatattggagtgctctgaatacttgatttggatggtctagaaatcctggggcacagcaatattttatgtcttcatctgggaggtcctaagaagggtttgcttatggaataaaagcccttatgatccgtgcacagcgaggcctctgtagtgttctgaagaagaaacctgacaggacacacaaaaattattttcctcgtggagggcatggaatcaagacagatccccgatccagtcctcactccctgaacactgcccagcttatgctaaatacgtatttatgcacctactatataccaggcacagttctaggagctgataatgtagccgtgaacaaaatgaaacccctgcccacatgctgtccacattctgataggaaaagatggacaatctgtaatcagtacaacacagtgtgccctctggacataagggaggggcacagagaaaaaaacaaagtaggctgaggacagaagagcaggggatggggtcaggtagccagggacagtttcctgcaaagtgaggagccaagacctaaccaaggtgagccatggctttctgggtgaaaactgctccaggagaaggcaagcatgggccctgggggggaacacgatgtattcaaacagcacggtggcagatgggaagggtccaaccagccacgctagggacaccttctatcctgtgggacatgagaaaccctggaggatcagaataaagtggaggaaaattaaagctgagctttgagtgcaactattttaagactaaatagagctcacattaagtctcttaaactgccactgggttctaattcgatgattaaatttatctagataaaggactctgagattctcgcatggtggatccatatgttgcgctaatacgtaaatgtccattattttacacaggtccagggaacctggccatcatctcgatgcaccaattctccctgccccacccaaattagaatgtaggtggtcacatagcaaactacaacatgaccgggatttcagctctaaaaagtgccatcaagacgtgttccccaacttgactgtggcagtcatttcttggtatccaccactgcagatcacatgcacacctcaaatacatgcagttcaatttgtcagtcatgccttaagaaagctggggggaaaggtgccaccaaatgaaataaagaagcgttcccctcccttgcaccctgccagcatttcagatctgtcttatcaaaactccctgtgcttgggcttagacagacgaaagaaaaatgatggggagccagaaaacctgagaaaactacgcaagtgcactccagtgtctgaatttccattctggaaaggaacgggcagcgctcagcctcacagcccacctgggcacctggcatcaaggccaccctctgccctggtctgcgtgcaatgccatgctgggctcagacacactcctggaacagcacagctctcatgagtccctgataatggcgtccgccacacgcccacacccttttggcactgtcttctgactgactgggctaaaaaaagcttcgataaaccccaaggatcagggctgggctgctgttcttctgaacataaacactggtcaggaggtgattacagttcaagcagaggggagcaaagtcccattttcccagcactaggattagatggcaaagtaatatcatgggcagtttttaccctcacaaatccctgacctccttccctgaggcccccttcccggagccgtctacatgcctgcctttactctacgccgggactccagtctataagaggataatcatttatgaataaacccatgatgatttacgttcccctcaaacgtgaacagaacccaatcatctgtttcttgtgttttccgattccaagaaaaaacatttcttggctgaggctgtcttgtttctggccagattttcctatatgatgtctatgttctctcgtgattaactcagagatatcaatctacaactacaggaaaacctcaatggctttacttaattggagcaccaggaggacatggtaaaggaccacagtgctggttcttctaagcgcatgtgggaactgaaggaaagaggatggggagctggactctgggtacccatgagggcttcagtacagaagacccatgaggacagtggttatgtgtcaatgcagtgcagtattaaaaattactatttgcctgcctttgctctgacatgagttaaatccttctcatctagattacaataacatttgaccctgagtttatatagactaggatcttttatgatgttcccaatcttgctttagttatggagaagctcattataaaatagtcttacaggaaaaacctgatcacagaggggaacactatagtgaagcaccaatacttttcatcaaaaatgttcaagtattggcaatttcatgtgtttcaacataatactactagccctcacccaaccacaggttacagagtgcctggagctgctagaataggcacaactgttctcaccatatgcaaggctcatcctcctccaaccttctcaatacatcattaccaattatcaaatcattacatctttatgaaaaagacttggcttatatgacacaggcagaagtgccaccctttcacaacattatgaaacgatgccaaataaggctagcacacctgccaccttttgcatttactgaagagctcttatgcatggacccacttggcctgtctcttagtcacagaagggggcatggggcagcctggctcggaacacctgtgcctgctgatagcagacgtgccagcctgccagagactgagaagctggacctcaaggtgttgggaggtcgggctgaggctgtggctgctgggccagctgatgcatggggaaaggatatgcatggtttccggagtaggaaaaaggtttaggaaataaacaagtggaaaaatatctggaaaatggaaccaggtacagtccctgccctcaaagagcaggtgctcagtctaaagaagtggtctatgcctgggtgcccactgctccagacagacttagaaattctataatacgtgtaagaaaaaaatcgttagtttccacttgttttttattctggggctggaggcgtggggcatggattcttaccctcttatttagcagtataggcaagtcattattttcagagttgttgcaaaacagaaaggggacaaaaatgttacatgatgatggattatattagaggagttcctgtcgtgacccttgagttagaaagcagatctgcgtaaaataaacaatctgagagctgaatgggcaaaggatatgaacagtcaattcacaggaggaaacagaaccagtaaacaagcacatggaaatatgtaataatctgtagtcagggacatagctgaaaaaaatgagaatgtttcacaaaagaagggtgggccgggcgcggtggctcatgcctgtaatcccagcactctgggaggccgaagtgggtggatcacggggtcaagagattgagaccatcctggccaacatggtgaaaccccacctctactaaaaatacaagcattagctgggtgtggtagcacatgcctgtactcccagttactccagaggttgggacaggagaatcgcttgaacccaggaggcggaggttgcattgagccaagatcgcgccactgcactccagcctggcaacagagggagactccatctcaaaacaagaacaacaacaacaacaaaacgaagggtggcaaggtacccatttaggggaccctcaggcccctaagtcagttacttgcatttgacagtcgtaatgtgaggagcactgaataaggcacagtccaggtgctcagaaataacaatgaccaatgggccaggtgcacagcagagatcagtgttaggagtcagacctgcaggtgttgcatcggaatcccaagcaggcactggcccccatacaaactcgccaggcctccgtgtcttcactgtaaaatggaatcgtaacaagcgcatacctcacagggatcctgggtggcaaacgaaatgggggaccagggtggacaggcagcatgggtagtggttaagaatgctaactctggaataagatggcctgggttcaaaccttgccccctcctccaacttagctgtgcaacatgggcaagttacttcacctccagatgcctcagtgactccatccataaaatggggacagtcatagtatctgcttcacagggtttatgtgaggatgaaatgcattcacacttctaggcagtgccatacttacagcagcacctggcactggacaaacactatggaaaacagtgcctgacacagaacaaatgcactaagagcatttccttacacacacacctggaaaccacttgctctagtaactggcacagagtgggtgtggcataaatggtgggagaaattcatcatagcctcttcccatctgggggtgtgctgagatgctggaaaagagggtcatcaaaaaaggaggaaaaatcccttagctcttaagccctaagaaagtgcttcacagcttttccttgaccatgaaaaatacagaagcaacacccgcagaaagaatagaatcctagtaattttgtgttctgaatcaagctaagtttgacctttgagcaaattactggctctctgctaagagtgtacagacccatctattcatcatagacttcactgtctgggaatgagccccggagcccaggctctgcaggttgttgctgttacgtaagccagtgcaggagccgtgctgagaaaaggaaactgcgcaatctgctcaggttcccaggaaggccagggtccttgtcccacctgaggagctgacttctcaactggcagcagattcaggcatgcacactgccttcgccggccactggaagggcactgctcccaacacccactcacacgctgcctggatggctctgatgggggccactgggcaggccggacaggctgcctcaaggagctggggacctgtggtgtcagacaagctgaccaccccccggcaggggtgggacatacgtgtgaaaaggggagtctgggggtcccccacacagtccatctacgcagatgcaggccaagctccccagataagcctgcctcaaggattctggccgaggagcagagggggcccttcctggaggtcacctgcccttgaagcaggtagagaagacatcttagtgtggatcagtgctgacatctgtggagagtggactctcggcactttctgtctgtggactcacgtccccatccccggagccctgtgaggtggctattatgagccccatcctacaagtgggcaaactgaagcacccatgtccatgctaccagggagcagcagtgccaggaagaagctcaagtgcccggccttcttaacctctaagctccaacaggtgacctccagtataagcggaggccttcctgccctccagaaaaagccgagagtctctgtagcgtggttccctcctgcttcttttgaatgaacgactgggagggaaggctgaggagacccacaggggcccagggactgatgcagggaaccccctcactggggaaagagagaaagagttggctaaagtagaaaaaactcgaagtgcaagcagggctgtggctcctgcatgaccgagaaagcctccttgcccactggagcctcagctgagggccttctcgaaggctctgctttctatattctctccactccctgaccacggcaggctgggttctcgtaaggtttagagccgtctcagggacaggagcaacccccgctgccatgcagaagatgcagaaagtcttcttttagaagcactggaaaatacattcgaaccgggatgggcatttcctgatgatgttggaacaccaacacagtacctcagggtgctttccacctcgacaaagggccgaggactttgcctccctgcctttatcttgcgagaacctttgcactgtggagtgaaggagctcggctgaaaactcaacaactgcacagcccttggctggacccacactagggaaggtgtctgcgaggctcgggcctgctcactgtgctgtgcgttggtctgcacacactgggacttcggtgataacttacagaagggaaatgggaggggaggagtaaagaaggggttggacagtgacaccagcttgagacagagagtaagaatcctgggctcccagtctcagtttcgtcatgaacttgctgtgtgatgtgggcccaatctcagcatctctgggcacaatgagtggccaccagggcctttctagcattcatatcttacccttccatgaatgagcgaggaacccgtgcagcccagttctgcagctaccagccacatggggctatgtcaatgaaaattagcaaaagtaaacactcctcggtagtactagctacattttaagtgctcaataacatgacaatttaaatgaaaattaattaaaatgaaaaaaattaaaagttcagttcctcagtcatgtccaccacatttcaagcactcagtggccacaagtggccagtggttactgcagtggacagtgcggatacaggacactcccaccaccctagggagtcctccacagggcagcatcgagagtgtgcagatggagatgtggctcacagaacgttcgggaagctgcttctttaaagaagaattgtgtgtcagcttggagcctatgtaaaagtaatgaaagaaagctagatgtgtctgttggggtaactaggtctgtaacagggaaagtcatcaagatacctgaaggtgagataaaataccatattgccacacccaagctatggtcagtggtgaaagactagcgtgtttccataagatgagaatacccatctgctgcctctataatgttgaaatacaatttgaagtattataaacaagatggaaaaatcatcattatttgcaggtgatacgattttatacctagaaaatgcaaaagaatcaactattagaaatagtcaaaggctttagcacaggtggttggttacaaaattaatacacagaaacaataatcttctctatatagaggtaaaaataagtgtaatttaaaaatcccatttttaaataatttcttaaatttacataaaaatgttcatattgaagaatctaaaacataaatacaaattaaagaaatagatagggtctatataaagaaaacttccaccctgtactgagtagagaaaagatggcttacataagtagaataacaccacaggaacctaggatgtaaagacgtcaactctccctaagtaactataaacccaaagcaatctcactcaaaatattaacaggtttggatgttccattttcgttttcattcttgtaagggagtagaggacagtttgaaagtaacagtatacttctagagttcccaaagaagaagcagcaaatgatactagccaggaaaacaaatactggaaaaaaagaataggacaattcactgtattaattgttaaatcacgctaaaatgtaagatcacagtcatgaaaacagtagtatgaaactggcttagaaatgaacaaaaagatcaagagaagaatcctgatagaagagcatatttgatcatttaggtggtatttcaaatcttcaaagaaagagcactgcttagcaaacaacattggaacatcccacaggtaacatgcaaacgagaaaaccagaaatctaactcactcctcataccagaatgtccagtgaattaaaagcaaacatcaacaacaaaaatgtacaagttctagaagaaaacctactcctatacatcttggcctaggtatgaaacaacctcaggagaaaggaaggcaaaatttctgcatctgaactacaaataaaaataatacaaaattctatggagtaaaaacaccataaaatcaaatggcaaactggagaaaatatctgtaatatgtgcagtaaggtactaatttccttaataagcaaataacttacatattcctaagtacagacgataaactcaccagaaaagtagcgcaagatatacacaatcagtttatagaggaaaaaaagcaacaactgactaataagcatatggaagggtcagctttgttcctaattaaggaaaagcaaattcaaacaagatgatactattttacgtctatcagagatcctggcaatgattcaaaatgatttctaatccccagtactggtgagaatgtgggcagagaggaactcatgcgatgctgggggtaatacatcagtataaacagtttgcagagcaaactgacagtatctattaaaacgtaaagtaaccatacctcctggctcagaaattccacttctagcaatgtatcttacaaatacatttacataaggaaacaaagaatgctatttgcaacattatttataatagggaaaaaaacctggcaacaacctaaatgacaatcaataggaatagctggttgagttgtgttatgttctaatcatgaatcatcagggagtcatcaaaagaagtgcattaaattagctgggtgtggtggcaggtggctgtaatcccagttgctcaggaggctgaggcaggagaatcatttgaacccgggaggtggaggttgcagtgagccgagatcacgccactgcactccagcctgggcgacagagtgagactgtttcagaaaaaagaaatacattgagtctactgacaagatatccacaacatgttaaaaagccaagtagcaaaatatagtatgcaatctaatactacgtaatgtaaacatgcagatggtacctatttaagtgtatttatctttccaaacacaccacatatgtttatacatgtgtgtgaaagggtatacatacactcaacagaggctatccctaaagaagggttgagagaagatgggataccaactattactttgatagttaattacgcctctgtgatttgaggcgtaattaacaaagtgatagttggtcataaaaaaatcatctaacgaatgtgacaatctatagttggtgcctactatcagcaaacggtacttactatgagtcatgctcttcatgcatttctccccagtgccattaaatagcctcatgggcagcatgaccaataggtgtagacctattgcaactggtgggtaactttttgcttaagtcagcttgtaatggctgtgttgtgttctctggctagaagggtagataagggataagttaccctgaacctaaagcacgagaactggccccaacaaccaagagtccagatcacgctatgctaaagcccctcactccaatcttcagtcccctggtacctccctatgacacaggtggctcacagaaccatcactggggacagactgctgggtggcatgctgctgcagggctaagaatcgcgtttttaaaggttagttcatttaattaaaagcacagcagggtgctgcctactttcattaagaaaggtcatcttccccagcatattctaatggaaaccagggcagcattcagagataggaaccatcacaagttgattttgctctcttaaggtaagatacggcaaagaatgaccagccacctcctagcagggtgctgaggctggctggtgcagtaggtggagatttagcagatgacaatgtatttctgaaaaggtctgtttttcctctaaaaggcattctaggaaccagagagagaagggagaaaggaggggaaggggaagatcaggagagagggagggaaaggaaaggaggcgaggagacaggagaaaaacctcaccaccaagcattagcatttatttctcaattgcaatatttttattttaagttgtgctaagaagcctaggatttctttcttcaataataatgatttttatgctttatagttcatgaggctttcatattcattatgttgagatttattttcaaaaaagtgtttagagtcttaagttgtttgcaactttgtagcaaagctcatttcacattaaaacatccttttagcaaagtctcaacatactatagtgaaattaatacaggtttttctaagcatttataagtgttaataagccatgccagtctgctggcatagcatatatggtgctgcggtattctgaatattcagtatctaaatctgttcatttcatacacacatgcacgtgtgttcacaaacacacatgcatgcaggcacacaccactgcaaaatttttaagctgcaggaccccctggcctgaaaaaatgcacacagcttctgaaagtgcctaagttactcatgggaaaataaagcttattatttaatggacttaacaatattttcttgttcatgatgatgttttacttccactgatacacaaatatttattaagtgcctactatgtggcaggcactgtcccaggaacaggttaagcagctgcaagcaatgtagacactgtaatttctgcattttaataaaattgctaactcatactaaatacttactatgagcctgatattattgtaagccctctatttgtattatgtcttttcatcctcacaacacaaccccaggaggtaggagcttttataatcccacttgataaaccaggagacctaagtgcagagaagttaagttacttgcccaaggtcacacagctggttactggcagaactgggatttgaatccagaccaaccctccttactgctgtacattgatgtagtttaacaagaacaactctaaactaaggtgggtgtccatctataaagaaggtgaatgctaggctgggcacggtggctcacacctgtaatcccagcactttgggaggccaaggtgggcggatcacgaggtcaggagatcgagatcatcttggctaacacggtgaaaccccatctctactaaaaatacaaaaaattagccaggcgtggtggtgggcgcctgtagtcccagctacttgggaggctgaggcaggagaatggcgtgaacctgggaggcggagcttgcagtgagccgagatcgtgccactgcactccagcctgggcaacagagtgagactctgtctcaaaaaaaaaaaaaaaaaaaagaaggtgaatgctgtccacattcaggattcagagataacagtgatcacatgtgtaggtatagacaccttcacactcactgcactctcagctgagccatgaaaattactaagattaataagcagcaacaaaacctgcacctaaagaaaatagatgcacagaaaaataagcaaaaaattaaacattgacctaatataaaactggtaacaacatattcattgacattaaaacaagatccttcataaagactaaataaatattttctgagtatctcctgtccttgatacgatcacaaacgttaccatgctacatgcaattctcacagcatcctagtaagccaccatctagacctctttacagacacaaagctgaagatgctcagaatctcaggcacagccccgaaggcagccagctgggtccacttcattccaagccacaaatgcaacacagaatgctctgtgctgcctctgcataaccacccctttcactaaatgcaggaagtcacccccacaaccaacaagctctatacccgcaccccatttcaccctgtgtctagtttgaaagatacatcttgaatttagctattctagaaagagataccaatacaaatgaaccctgaatcactttccaaacacctgcaggtgtttccaggcagttcatgaactgtaacacagtgaatttttctgaagggtggtctgttttgaggggctgcacagcagttttactgattgcggaccagaccacctgagatctacaggttgggatgcatgtgagggaagctgtacaaattccccagaatcgtgactccagcccagaacactgtcactacttgactagagtggtggtaattctggaatcatccgggtgacctgcctaccagcaaaagcttttccttcttaatctactgagtaacctaatacctgaagccagctcagaaaattcccattatctctgaaataaaatgttttcatctgagttctctctctgtatttctttatgctgatattttcatatttcatattcttttcataataatgctgataatttcagtcatcttcaggaggagggtcattcctttcaaaagtctccccttcaggtgagcacgttcccctatttgtattctaaacaaagcgggcagcatctcccagcagcagggaataggtccactcaggaagcggctttctcacctgcacagtttctgctggagggagaggggtgtctctccacttgaaaggttcaattacacacttatctttataataatagcttctctgcagcacaaggcatgacttctcccttctgaaagtgcactttgcctttgatgcctgaaataaagtgtaagtcaaccagcaagctccactgcagcacacacatgaagttactgccccccggcggcgaccgctggtctttgaacagcattggacaggccctcggtgcaaagctctccggcccctccacaagctggagactgcttctccctacctgcggcctggggacagccttccctggcaatattaccgggttccagctggcttggactcccgaagtcccccggtttgtatgctccgggttcttttggatggcgctgggaaaggggagaacattattcgttggagaattaagtgggcagagtaaaaccagcaggctgcaagaaaaaaagacctgcttttgagttttgctagtatctattgagcacccttgaggaaatttcgtcacccttctcagcacgaatttctcactgaagagatgaaaggcacagccttggaagaaccttctggtcccaggacttcgagaaccccagagtcggatatccagttaccccgggattccacagtgcttattatttttataaagggtgaagaagtctccttcatctatgaaatggggaaataatagtatatatcttagaaggctgtaagaaggattcaaagagatgatgtacctaaaatatctggcacaagtggtaagtgctaagtaaataggagacctataattgattgtaagtataattgattgtaagtgctaagtgaatagaggacctataattataatttatcactcaagcttcagagtgggagagggtgctactaatgatttcacttggatgacaggcataagccaggatggacaaagtggatgagacatgtcaccttatcaatcaataattgccatcatgacatttggaaaagtcttcaatgttggcagatgttttgagaaacattttactcaagtgatctggccttgtgaggctatttttggcaaatcttcaagcagtaactggacagaatccgtcttggggtcacttcttttttctttttgagacacagctctgttgcccagactgaagtacagtggcacaaccttggctcattgcaacctccgcctcccgggttcaagcgattctcctgcctcagcctcccgagtagctaggattacaggcgcccaccactacgcccggctaatttttgtattttttaatagagatggggttttgccacgttggccaggctggtcttcaactcctgacctcaggtgatctgcccgcctcagcctcccaaagtgctgaaattacagggataagccacagcacccggccatcttggggtcatttaaatcatccctgacacaggggtcatctcagatcagtactgtatatgtttccaagaccaattaaagacacaaagtttaagtgactgaaatgtacctcctctctagccacatgctggacaaaacagggtacgggtgtaagccagagaagctgtgtggaagagaactagaatcacattgaagaaatgctctttttgagcagattcctacatggaaaactctgatttaccttatgagggtgtggggaatgacaggcaagtgggctgtgagttccgtgaagggagaggtggtgtttgtcattcaccaagatctgtctagagctgtgccctccttacactggggaagtgggctgccagcctggggccccacagctggttttgcaaccagcacagtgctcagaacagagatggcacccaaaaggtatttgttgaataaatgaatgaatgaatggattgatggagccaggattcaaatctgggtctgcctggtgccagtgtccaggcactgccttccacctgagcagcagggtgccacctgcctggcacgccatcggcatgcataaacatccattacatatatgtgatagttaatattaagtgtcaacttgattggattgaaagatgcaaagtattgttcctgaatgtgtctgtgagggtgttgccagaggagattaacatttgagtcagtggactgggaaaggcggacccaccctctatctgcgtgggcaccatctaatcagctgtcagaataaaagcaggcagaagaatgtgaaaagactaaactggcttagcctctcagcctccatctttctcctgcgctggatgcttcctgctctcaaacattagactccaggttcttcagctttgggactcagactggcttccttgctcctcagcttgtagacagcctattgtcggacctcaccttgggattgtgtgcgtcaatactccttaacaaactcccttttaactcctctttatatatatcgatctatcctattagttctgtccatctagagaaccctaatataatataaatacatgactgaaagaatgaagagtcgtaactcatgtgaatctctgtttcccgtaggtaaaaacactctcttcacagagctatcctaggattgaaatgagatgtgaaagatatatgaaaaattcactcgcattaatgccatgctttaagatgataagcagcagccaggtggagtggctcacacctgtaatcccagcactttgggaggccgaggcgggtggatcacaaggtcaggagtttgagaccaacctggccaacatggtgaaaccctgtctctactaaaaatacaaaaattagccgggcgtggtggcaggcacctgtaatcccagctattcaggaggccgaggcaggacaatcacttgaacccgggaagcagaggttgcagtgagctgagatcgtgccattgtactccagcctgggcaacagagcaagactcggtctcagaaaaaaaaaaaaaaaaaaagatgatgagcagcacaggctttagagttagctgaaactgggtttgagtctagggatcaacagttcctcacctgtgtgacctcagacaggtttacttggcctcagattcctcctctatagaatggggatgataacagtacctatgccacagagttcttgtaaagataaaatgatacgtcttgtggagtcctgataagtaaacaacaatgagaaaggggccccagatgggagagaacaatgaacagtgattctgagaaatggccaatcacaaacaaccccgggcacagtgacctttttcagcacataggcccctccagcgcaaccctataaaacttccttccagcctctgccgcttggcagacggccccttctctgctgtgctgcctgctgcacccttgcaacatatttttatactttctctaataaatctggctttctttacctgcaactgtcttggtaaattcctttactgcctgtgacactgaccccggctaggtgcacccgtgacatgtattacataaatagggtacttaatatacaaaataaagcacttcatattaatgaatagaaactattttattatctttaaaataaagcacaaagattaacaaaaattaaaggtgattatcatggattaaatgcttgcatcccccaagtccaaatgcagaagccctaatccccagtgtggctttatttggagatgaggcctctaaggaagtaattaggctaaaggaggtcagaagggtggggccctaatataataggattagtgctcttataagaagagacaccagagagcttgctcctctctccacacactgaggaaagaccacgtagggacacagggagaagggggccatctgcagcccagaggagaggcctcaccagaaagagaccatgctgggacctcgacctcagacttgcaggctccagaactgtgggaaatacatgtctattgctcaagcctcctaatctgtgttttttgttatggcagcctgagaagattaataatacagtgataaaataagacatgctattgttatgttgaggaactttctgaattaaataatatttttgtctcttaatcgtgaattcaggccgacctcagatacctctctctttggcattaattatgattgcacatgggaatttcatgcggcacctgctgaaattagtaacaaaaggaaaagtactggacctttccaagttataaaaggtttagcttcccgagttctttgttcagaaatatggtgggtaactgctcttgatactcagaaacttagtaacctagctatagtcctctcaatgaagtgttccatgttaaactatagtggctaaaactattcttttatggagctgaagctaaaaagaaaaaaatcagattagaaaaaaatcctctttttttcctccaaataagtctttttaataatgtcagggatccgtttggatttgctccctttttttttttgagacagagtcttgctctgtattccaggctgtagtgcagtggcgcaatctcagcttactgcaacctctgcctccagggttcaagcgattctcatgcctcagcctcctgaatagctgggactacaggcgcgtgccaccacactgagctaatttttgtattttctagtagagatggggtttcaccatgttggccatgctggtctggaactcctggcctcccaaagtgttggaattataggcattagtcaccacacccagccttagaaagaaatcttaatatgcatttctaaacactgattgctccacagaagtcaaaaaagtttccaaattaaaaaatgtactaatgaatatctaactgtggtaggcagcctatagcagggatcgccaacctccggaccacagaccagtgccagtccatggcctgttaggaagcgggccacacagcaggaggtgagcagcgggtgagccagcaaagcttcatctgtatttacagctgctgcccattgctcacattactgcctgagttccagcggcagcagagtcccataggagcatgaaccctattgtgaactgtgcatgtgagggatctgggttgcccactccttatgagaatctaatgcctgatgatctgtcactgtctcccatcagccccagatgggaccatctaattgcaggaaaacaagcttagggcttctactaattctacattatggtgagttgtataattattttattatataataatagaactaaagtacacagtaaatgtaatgcacttgaattatcctgaaactagctccctgccccctggtctgtagaaaaactgtcttccatgaaactggtccctggtaccaaaaatgttggggaccactggcctataggatggcccccagggatccccacgtcctggtatttacacccttttgtaattccctctccctgagtgagatttgcacttaccgactcgcttctcaggaatagaatacagcgaaagtgatgggatatcactgagattaggctacaaaaagatggtggatcccattccatctggcttgctctgagggaagcctgctgccatgctgcaagccaccctatggagagggtgcagcagcccccacacaagtgagcctggcagtagataccactccttcagttcagccttcagatgaaaccacagctgatattttattgcagccttgggagagactctgaggcaggggcaccaggctaagccatccctgaatttctgacccacagacactgtgacataattaacatttattatttaagccactaagtgttgggtttgttacatggcagtagataactaatacacaaacctatattgtatatacagacccaatcactctgacaggcattttatgtgtatcataaaatgtgagtactatcaacagctccatttacaggcagggaaaccaaggcatcggtaggataaatagcttcccagagtcacactgcataagtgggaaaggtatgcttaagacccatagccttaaccagtatgcttcccagcctcctcatgtagacttcactggggaatgtgagcatattaaacccagctaaatcttcagaggtgaaaataaataaaaaacctaccccaactatatcaaatatggtaaagaatttctatgatgattgaaatttacacaacatgaagccaaccctttccccaacgtcaaagtttgagttaaggtaattaatattctcctgaggttacactttgaaaatgtttctgtttttcccaagaagagacatttttactttctactgccatggtatagcctcctaatgctcagagatcatggcagagtgatcggctgtgtctcatcagcattcttatgctttgatggtgattagtatttacaaaggaaaaaattgtctctcacaactgaactgtatgtgaaatgactggcacttcctcagcatccttgagatgagtcctaatgattctgcatagacaatgtacacccagggtctacccatcccacacatgctgatgtgtgcacagtcactattactgtaccaggagtgatgcgttctcagacctgcgcaaacaggccctgcggtgatatgtatgaaaatgagtggatcacatttttttaaaaggagagaaacaaagagacaaagaatatagcctgaaatataaacattggaaccaacagctcctgccttagctattctgctctagcacaaagcctattttttgttcctttatgtaattgtcctgaggctggaaaagcctgaagttgcaggcagtaacatttaaagctactgctatggaagaaaaaatgctttaagtaatgaaggtgacagcagattgagctgagaggggaaccaagcagttgttagggggtggagtggtgaggaggatttaaagcagctctggatgtgaaaaacatctgattttagagtcagaaaccctaaaattagagaaatagtggaaaactgaaaataaacttcgcacatatgtaacatgtagctttcaaaaatgtacaacattctgaaccttcccaaataaattaaactctataccatattggagataagatcatttaaggggaaattttattcagaatttaaatctgagaaaccgcatgcctcaccctcacactagggtgaaaagtgaaaatggcctaaaactgcctggattttccagtgcaatagaacccaactgttactctcctgctaggatgtcacattttacaatatgctacaacagactggcttggaagaggaacaggcagaaacgcagccaagtatatacaacctcaggagtggaaactatgtacatcagcagggccaccttaggtcctcaaaacacttcaatcatcaaattgctttcgaatgatgtcctgcgaccagaaaacaagttttgggaggccaagtgcatgatctgccgtttgggtggagagtgagcagcacccattaaggcgaacggaggtaacctaaggttaaaccaaatgccccatctcctggtctgtgggcaccagtgaccccgcctgtaggccacagggtcaaacaacaatcaggagaaggaagcctgcagaccaagggcctggctcccggttcaggaaatcaaggcacagaaagggtaagtcatctagctagaagtggagcttcatcaaattttcagtgatctttttaagatataacgatgcctctggtcaggccaaaccccggcttcagacaatggttcccaacctcagctaacaattagaatcacctggggagctttccaggcgattcccagccccagagattggaatgggtttggagtggcctggaaatgggaatttttcaaagctccctagagactctgacgtgcagctaaggttgggagcactgctcaaaggtctctactcacataaagaatggaaggatgtcacttctacttctttcatgctgatccgaatattttgttattaaaagaaagtcatgatagcactacatctatcacaaatcttaggtgagttgtttttgttttttttaggtaagtttactcaagcgaaaagagtaaatttttctataattttctgacttagccttccagcaaagctctatgaatcaaatatacattcatatttcagacaactgaaaaaagggtatttgtttccattactatacggaactatattcactgcttggaaatgaacggaatattatctgagaactcttaaattcctggtcagcttgatgatgactgaataaactcttattccagggaaccaactaaccattttcagcaattcaaagcacatgtaattactggttcaaagcattttgaattgttttgcttttctaaatagaaaagaaaaaaagactcacaaaaagagtactataatggaatatgttcatcaaatatttgtacaaacagaaaataatcatattttaataaaagttttcattcatctgtaacagtgtgaatctaatacatttaattaacaaactcattatacagtatttacaatattgatcctgagccagccaatgaaaacaaatcttacatatctggccaagcaattatagttacaaaacagcttctgatgtaaattttcaaaagaattctagttcaggttaattttttttctttccttgaagactaagcttacagaatcatgtgactatatataaagaagtttgatccagtcttttttcctcacaccatcactctccagatccaacagactggctaaggaggggacggccagacccccagggacttttgtcagcattgcagttaatgatctgtttacacaaggggagataccaccaacctaaagtagatttacatttacattacatcatccaaaggtgacaccccagtcttaacagtaagactgccacattgaaaccgcagaaactacatattcccacctagaaggatggtttcagctaaatgagaaatggtccacttgctgcaaggcttaccaaggacccgctgtgactttagctctcaggttgcccactgcatagagctatttgccctcagagactgggactcccttagcccacctggtttttgggttttcactgattgctgtatatctcacaggaccctagaattggacatcagtgcacaaccctccctcatccccattctgaagctccagattctccaaatggagagaagaggctcagatggaggctctgcccctttctccatctccaataccaccatcctagtcccactcccttcctatctcccctggatgatggcaacagcctcctaccaggtctccttgcttcctctctagcctacccagtttccctcctgaaagccattctccaccaagatgtgcaattagaatcacacctgaatccttaccatggccccagggggatgttttctggttgcttatccaacctcagctaccaatcgcctctctgtctctcatgcaacccttcaagtcctttaaaaatggagttcaccctgcactggagcttctgcacctgctagtccctctgccgggatgccggccacacaaacacctccccagggagcttcttcctgtcaacctggtccaggctgtgcagaggcctccctgggccactccatctaaagtggctccctactaactcctctgtgtaagtcccctttatccacactgtccccagagccattatctacccttctgtgggccctgaaaggatgacccaacctatggactccactgcaggggctcccttgcctcctagctgtcctttgagttctgccaatgaaatcagaagcctgagaatttcttccctgcctgtaccctgccttagcatctcaactccacaccttcaagtctacagctcctggcaggcagctcctcccctaggtttccagccacgtgacttcctcccccagctccagcttccagctgttgctcatggctgcaggcctggacatcccttgttagttccctcaggactgccccaattcaccagctcttcaacaaaacccccacagtgttaggacctgaccactctgaccaagccccctccccttgctctctatccctgtttcagtctcttcatcgcatttatcactatccgaaatgatcttgttcacttgcctttttcctattgtctatctccccctcaaccactggatcctaagctccatgaaagcaaggagcttgaaatgttccctgctttatcctctgggcctaaaccagtggctggaacacagtaagcactcaatagacagcaaagcctgaatgaaccaatgctacattgtctctgctcaaaatatcaccatatcagtaagaccttccctgatcatcttatggaaaatagcaatctcccctccactcccagatctccactccctcctcctgccctccaagtcttattttttcctatagcatcattactttctgatacatttgatatttctttattgcttgtttcccttccaaaaaatgtcaaccctggaggcagaaatgctattttatttactgatgcagcctcagagcctaggacagtacctatcccgtagcgaagtctcaataaatatttgttaaaatgaatagctagcgaagtgggcaaactttcatacaacacaatttcaggattgtatccaacactggaaaaaattgtctccaacactacaagtaagtgccgtcttacgtgacttgaccttgttctagcagaaagacagcctagaactcctaaggaaaaggtctgaaatgctggctagcgcttagtttatatggagaggaaaaggttttagagtaagatcaatcagtaagaccctgagttcctgacaattgctgctctagaaagcatgcctggaagcttacctaagcacacggccattgtaattcctttcagaaagtaagtgaacatataaattataaataaatgacacttacatacaccattctgtttcacagtggtgttgtattggcagcagccttcaactatagttcattgacagcatttgtggacccacagccaagcgctgaaagcactgctttttttgacagctgctctcctaatggggcatctctcaaagaccggtttcattctgtgacgcccacgttgtccacattttattctgcacaataactgcagatttgaaataaattcttcctccccaccaccattattgattactcatacctgcccctcaccctccaaagtgtctaaattgtgtggattttgcgggggtggggggaggcgggggaaggagtcgactccccatgtactgggtgtccccgatggcggcaagccacaccttcacacaagggggcaaggttcttgactaaatatcctaaaggtctgaaagatggtccccttccccccaacacaattccaccaaaactggccagccgctggctaatgagcaaccacggatcctcacccaaacattggcttttcttccaatagtgcagattgggaatgcagggacgtcgtcctatttatgaacactgagtcacgtcgccgctcaatgtctgtttcctcctccctaggaatgaggtgaccccctcctccagcgagtaaatgcggggcgatggcgagagcgcagggggcggcggcgctgccccaccttggggagcgaattcacccccctagtcgcaccagcctgggcgcacacgggggccggggcgagcctgtgggactctgcagtgagctccgcgcgccccgggggtgctaggggaccgggaccctcggggcgccgtccccacgccccagccctgacgggtccgcggccgagcagcccgggggacgtcgctgcctccccgccccgcgcgcggccgggactgggcgctgcgacccgcgccgcctcctcgggcaacaagtgtccgccctccgccccgacggcccgcccggcgcggtcctcacccggcacaggccgtccacgaacacgcgcgggtccaggtgacaggcgatggtggcgctgggcaggtcctgcaggtccacctcctccatctcgcagtcaatgaagctccagtcgccgccgccctcgtccgcctcggccgcccccgagaggggcgcgaagggccgcagcgtcaccccgggccgcgctcgcgcctcggccgcctccgccgcctccgccgcggccccgagctggggaccggccacgccgtcctccatccccgcgcccgcgcgaccctgtgcgccccagcgggctgctccgggcttgcgcgccggagcctcacgcgctccggtccgcgcccggccggcggctccgccgttaaccccctcggaatcgcgcggcggcaggcggcgggctgtcagcagtctcccagcgacacggcctcccagcgccagccccgcccgtcaccgttccgcgcgggaggggcagaagcccggcgcggcgaccgcccccccagcccctagggccggccaccggcagatccaacggtggcccctttaaggccggcgccggttgggttattgtaccccgcccttccaggagacggggccaataaaggaacggaattctcttcacgtgaccttccttctgccgcccgaagcccgaagcctcagggcggccatgttggttaggggcaaagtcctcgtccccagttccgcttttctgacagctggtgccagctgaaggacgccgggcagagtcctcggctcttgggcccttggggtgataactggggaggcaacgtttttgtggttcccatgcggggacgttttgaagcacaggggcccacttttgggaatttaagcgagacatagtctccctgtggctctgtggcccctggcaagtggttagatgcttaccgtatattatcagatatagtcgcaataaagactgaactagaccatgataacaatgccttacttttctatttcagcgtattagtcactataccattgtgaaaatttatgtaattagaagtaatttttctgaattaccattatatgctatgtacaataggacataacgaaagaattaagagatcacccctttcctttggggaatagcggaaaaataagaggacctcaagtgagcagacatgtctcttcctgaaaaatagaattcttttttggacagtatgatacagtgagaacttgggtctgaatttcagctttgctttttaactacttgtacaaataagctgaatcttagtttcctcatctgaaaaaaatgaagacatattactaagaattcagtcagtgcttaataaatggtagctgtttatgcactgggttctttggaggttgtgaaattacagttatattttttcttagagtaggcttactctctagttaggaagtgttagtaattataacaaaaagtatatccaacagctgagatttattcagaacttgccatgtgcacggttctatgattactattatcatagtcttaggacagtttgtgtcctcagggagctaaacccaagaggaataataatacccatctagagataactcataaaatagaatatgatatgaggatgtgaagaaattggaaccgtcatactgtgaaagggaaatcttgggcccccaaaatcactaaggaaaactaaagctggaagttgcttagagccaaccagcctcccattccattcaaagtcacccctctgctcactgagacagatgcatttcaccgagacagatttgcctcctttataaagactaatcagaaacccaaagagtgtaaccgtttgtctatcacctatctgtgacctggaagctccctcctgcctcctgcctttgcagtagtcttcctgcctttgcttcaagttgtcctgcctctccagaccaaaccaatgtactgcttacatacattcattgatgtctcatgtctccctaacatgtataaaaccaagctgtgccttgatcaccttgggtacatgtcctcaggacttcctgaggcctgtcatgggcatgccctcaaccttggcaaaataaactttctaaattaattgagacctgtctcaaattttcagggttcacaatatattgctgatgggcatgtaaaatggcgcagccactttggaaaacaatttggcaagtcctcaaaaagttctatgtagagtgaccatatgacccagcaattcctctcctaggtatatacttaaaagaaatgaaaacggccgggagccatggctcacgcctgtaatcccaacaatttggaaggccaaggcgggcagatcacctgaggttgggagttccagaccagcctgaccaacatggagaaaccccgtctctactaaaaatacaaaattagctgggcgtggtggcacatgcttgtaatccccgctactcgggaggctgaggcaagagaatcttttgaaccccggaggcagaggttgcagtgagctgagatcacgccactgcactccagcttggacaacaaaagcaaaaactcagtctaaaaaaaaaaaaaagaaagaaagaagtgaaaacatatgcccacacaataatctgtacacaaaagctcatagcatcattattcaaaatagccaaagagtggaaacagcccaaatgttcaccagttgaagaatggacaaaccaggagtatatccatacaatggaatattttccagccctaaaaaggaatgaaatgctgataacatgccacaacatggaggaatcttgaaaacattatgctaagtggaagaaggcagtcacaaaaggccacatgttattccatttatatgaaatgttcagaataggcaaatccacagagagagaaggtagtttagtgggtgccagtgtttctgaaaggggaaaatggggaatgacttgtataagggtagaagggttcttttgggagtgaggaaaatgttccaaaatcaattgtggtgatgtttgcacaactttttgaatatactaaaaatcactgaattgtaccttaaagggtgaatttcatgacatgcaaattatatttcagtaaggctagtattttaaaagaccacaagacattggatgaagtgcagcagaatggatgacactgcagagccgaaaagtctcggtaaactcggccaggcattgtgaaaagggtaacaaaaggatgaggcactggttttggaaaaacaacacccggtcaacctgtcgctgggtgggtccatgttttcatccttaggacagtatgctctttcattgctggcttgccataagccacttacagcatgcagagtgggcctgttggacaaagtgttcaacaggaaggaaagcaccaacaaaacagaaagccaaaatgcaagcagagcaaacccttgcagctggctctctgatgtgttaagacaggagcgagcaggaacaacctcaggcgagtggtgaggacagttacttgtaactgacttcagaatgcagctggtcattactcagatacagaccacaccaaacatttccctccacatctgtggatccccacctctctcctctccttccccatctgcacttccccaggaagctaagtgaagagggtgacttttcttagttctccgaccagatcaattacttgtctgtataactccgacaataataatactggtctcttctgtgtagctcttaaatcgttaatgggtgtacacataaactagcccacatcatcttaacaaactggtgttattactgcagattcttagaactgaggctcaaagagataaatgaacttcgcacaagaaaataagcagagagcccggtgcggtggctcatgcctgtaatcccagcactttgggaggccgaggcaggtggatcacctgaggtcaggagtttgagaccagcctggccaacatggcgaaaccccatctctagttaaaatacaaaacgtagctgggcatggtggtgcatgcctgtaatcgcagctactcaggaggctgagacaggggaatcgcttgaacctgggaggtggaggttgcagtgagccgataccgagccagtgcactccagcctgggcgacagagtgagacacagtctcaaaaataaataaataaaataaaaataaactatagcctctcccaaggaagagaaaaaagcgaatctatgagctgtcatttctgcacaggcagaaatgaaataaaacatgctctttccacacaattgcagacatctccaagggtgaaatcaactatacctaggggtaatctcttaagatgctgtgctgccataaattgtgtacaaattcctcactagttctttggaaattgttagctgggcctcttttaccagctgtggcaacagcacgtaagatccatctctgcttccccctttggcttctaagtagagagccttcctttttcattggctcaaaggagctgatttgatccagcttttcagaaggggaaggaaccaaaataggtaaaaaaaaaaaaactcagtgattcttttttttttttcaaatggaggaaggacacacattttaattaatatatcctaccacctcccaatcatttcctctccttacatttccttcatgtcagccattgcaattacccaatataaaaggagaagaggcgctcagaaagccatgtttggttatttttgttcttagcacctgtctcttacatcaattgcagcccagttatgcagacgtgcctatgcgtggataaatgagcctattcatttgccaggtgggaaagttttactctagatacttttagttgcatcctgttttattctggaaattaaaggacgctgtgttcagtagtcacttgccaagtgtttattaaatgaaccaaaggcatttcggcacattctgagaaattatagacatttaaaaaattcatttaaggtggaaggcaaattgctgactttctgagtgtttgctttcacaatgaatgaacagttccaaagactgcttcaatgaataaaccccttaaataattcatttggaaggctctattttgttaccacctatgaaatgaataaaaatgttatgctattttattattattgttttgttttattttagcaataggaactttttttccctactcgaagttcattcttaaaacccattcttaaaattttctgttatttttgatggtattatgaaactttttaatttagaaagatagttataaatttgatttgagggaaaatagtagattttggtgactttgtctaagtgtggaaaggaacttcactgactttgacctttctctaagttctctttgaagcgtgctggcactcatgtgacttttatgttgagttaggagtcttctggttgccagtaaccacaacctctgaagccagtttaaacaggagatcatttaaattaaggatgtaaggcaactctggaagcctaaggtgagaatatcgcctcgggaagggtctagaagatggaccctgatgctgcctagaagcgggctgtcttcttgggccctgttgaggccatcagaggtgggggatggacacataagcaaatgggcctccacttctgaaagtcagcagccccagcatctccagggagcgctcattgttcaaaaggtcttcctttgtttcaagctaaaagcactgctcctgcaggagtattgcacactctccagaagccagatagacctggccttcattcagctctgtcctttattatctctctggcctcagggaagccacttgacctctctgaggtcctgtgtgtaaaaaggtgatataaatagcttcctttcagaggtgccgcagaggtcagacacatgcccagctaatgcctgccatggaggagtggctcagaatgacaggacctcaaattctcttcgtcccaggttttcattttaagatcgccttctcttctgtgtcacagcctcttaacacaaaataataagtaaatagatcttcccctctggccagcttctcaggagtgaataccagggcagaatctggatccaggaccagttaactgttttgcttgttatgagttctttggatttcaagacagatggtacattaacaactcatcccaccccatccctgccctatggacaggtttccctggcttcccttggaagccacctgtgtttgctgggccagcctgtcctgagatccgcctgatgtcactgacataatcccaacaggacagatttcctttaaggcagggatgtccaatcttttggctagtctgggctacaccggaagaactgtcttgggccacatacaaaatacgctaacactaatgatagccaatgagctaaaaaaaattacaaaaaaaaatctccttatgttttaagaaagtttacgaatttgtgttgggccacattcaaagctgccctgggctgcatgcagcctgcaggccgtggggtggatgaacttgctttaaggggttggggtagggcatccttggtacttctcccagtgtcctccctcagggttttaactgctgtgatgcgttccttccttaattctaccctatactgtagaagtcatatcttacttgctagtgatgttgaatagtgcctggtgtgttgaataatgatgccttcatgcttgtatactcacccagaggagggctaaagtgacaacactaagcaagccttgtccgggcctgactcagcctgactttggctcaggggacttctacactcattgggatgctgttaaagtttgactgtgtccccacccaaatatcgtcttgaattgtagttcccataattcccacatgttgtgggagggacccagtaggagataactgaattatggggatggtttcccctatagtgttctcatggtagtgaataagtctcatgagatctgatggttttataaagagaaggcccttttgcttggctctcattctctcttttccagctgccatgtaaaatgtgcctttgctcttcctttaacttccgtcatgattgtgatggctccccagccatgtagacctgtgagtccattaaacctcagtaaacctctttcctttgtaaattacccagtcttgggtatgtctttatcagcagcgtgaaagcagactaatacagatgctatgtgcagagcattatctagatgctggagctatgacggtccacagaacagacaaggtccctgacttcatgaagtgtacttcctagtggtggtagtggagggaaggagagagatggacaatacataaaataagtaaatacaacatgtagatgttgatgatatgcatggtgaagtacaaaggaacaaaaaaataaagcaaagaaaaggaactggaaatagggaggagggaggatttcagctctagcaaccagggaagactgaagaagggggagaatgccatggctacttctggaaaacagcactccaggcagaggagaaagtgcaaagtcctgggggcagcagctgctcatcttgttgaagcaacactgcaaaggctgtgataggtttcttctggggctgggtgagtgatcaagggggtgagtagtgtaaagttcagaaaagtgatagggtcagatcatatagaactttgtaggtcacaggaaggagtttgggtttcatcctcattgagacagggagctggtggaggcttgagcagaaagtagctaacctgatctttcttacaactactaggaggactcacttgggagctgtgtgcacagaacactgtgtggggacaagtgtggaaaccagagacctctcaggaggctgttgccatcatcccagtgggaaaaggtgggaacttgggtctggatggaagacccaaagtggtaagaaaatggtaagattctttctatattttgaaggctcagacaacaggatttcctcagggtattagttccttatggatgcgataataaattaccataagcttagtggctaaaacaatacaaatgtatggttctggggggcataagtctaaaatggggaaacggggtcagcagaactgtgttccttctgtgggctctgaggagaatcgctattttttttttctttctgagacagagtctctctctgttgcccagtctggagtgcagtggcatgatctctgctcactacaacctccgcctcccagattcaagcaattcttctgctttagcctcccaagtatctggaattgcaggcgcacaccaccatgcccagctaattttttatttgtacttttagtagagacggggtttcgccatgttggccaggctggtcttgaactcctgacctccggagatccatctgcctcagcctcccaaagtgctgggattacaggcgtgagccaccgtgcccggcctatctgccatatttagagaaaaggaggcatcaagactgactccaaggctacaggaagaagctgcctctaacctggataaggtagactgtgagagggacaggttggggaacagctatccttagcttactttggagcaattcaggattgagagaccccttagaggtgacagtggggggacagggctctagatggcatctaaagccactgggccactgagatcccctagggagtgagtgtagctgttgacaagagagtctggggtctggaccaggggcacagtgacactcagacaccagccagcagtggtgcctgagaaggggggtcagagaggctcaagagccaccaggcaggtggggtattctggaagccaacaacagaaagggcttcccagaggagggaaccagcgctgctgaaagtcagcttgggaagagccctctgtgactagcgctgctgagaggtcagctttgtggggacagggaactgagtttggatttccaagtttggcagtcctttttgaccttggcaagataaattttggagaattatttagaagtaaaagcccaattgggagcagaaaaatggaagataatgagtgtaagcaactctctcaagaagttgtgctgtgaggagaactgagaagtgaaatagtacatggaagaggaagtgggagtgaggggagggtttcgtttggttgaagatgggagaagccaccccaggcctgtctgcaggttgggatgatccaggagagaggaaagcttgatgaccggggctgggagggggagagaatttctgcagccatctctatgggaaagagagagcacctggtacatgaacagagaggcgggtcccaggtggcaaagcaaatctgtccatcgacactgaaggaaagcagcatgtaccacggataccctgggcatcagtgcatgggacgatgaaatattggggcagggctggtgaaagccacttgtgttcatctccatcttctcagtaaaagaggagtctgagtgtgaggatgaggaaggtggcattgagtgttgaaggcaagagaagaaaatgtgaagtgatcttctaggaatgtgggagaacaaatggactagaaaaatataggaggattatatatgcacaccaatgtcatatgagtatcaatgtcatatgagtatcaaatatgtatacaacatgcaaatatatgtatatatattaatgtttacatgcaattacgatatatacatatgttagtagatataagcaaatatatttatatgtcttatgtataatatgacacatgctgcaacataattataatctatagtatctaatatgtactagatggtatatgaatatatgttcatacatcatacatgaatatagcaatataggcagataagatatgttacaatgtattattaaattgtgtatattatatgatgtgcaataaaaacacaagtatttatgacttatctgtctcctccactctatccaaaatatatgtaatgcacgttataaaacataaagagaaataggaatttttaaagtataagaatagagaaataaacacaaatataaatatgtcttgagctgtcatcctcatttcatctagagtggaatcttgatgaagggaagctgtttattttcactaccactctgccccgcctagaatgtcctgggcctagagggggacttcaataaatatttattaaatgaattaatgaaaaatgtattttatacttgaacttaaccaaaaggctgagaaacgatgaaaaatatatcttatttattcagaatcaaaaatattttgttttcttaaaaatctcctgttattctcaatgacttattaacaatgtcttagtcagtgtaatgttattaaacatgcctcatccttttgggaaatcgtggagaaccatgagcagcatggagtgctgtgcttactaaatcacaatatccatttttcaatcccatccaccaaatttagaagggattattattatcaccgagtaaatttccatgctccttgacatcaatgagttgttttttcatattaattggaagttgttcgtttttatgtttcacaaatgggttttaaaactcacagaaccccttggaagcttttagacagctgataaaattgtgtttcctagtttaaagtgcaagatatgagaacttttatagatgtcacacatcgttttttggcaataaaatcacttaatgatggaaacctttccaaactcctgttttcaagatattcttactgtagcacaagtttctggcagacagtgattactttctcacacattgttaactggcatcttgtgcttgaagggccaggtcaagctggtttatttatttatgttaaatcatcaccatggctcgaaccttgtaacctggctggcagttgctcatgcgcagaggggagatgtaccagctctgttcctttcttgccattcatctctgcttatgtccttagaaatagcttcataccttaagttctagggtacacgtgcacagcgtataataatgataataataaataaataaataagtaaaaagaatcctgaaaaaaaaaaaaaaaagaaatagcttcataccatttcttagcaggcatccttgccagacacttgcctgtttgtgtgaggactggctcagttaaagactagataatataaaccacacattctcttaatgaaaatttgggatctgcaataacagcacaattctggaagcagagaaggtgtgtggagccatgtcagcccacaccacctggcaccccaggtgcccatcagggggcctagtgcacccctctgatgcctgtctggcttctgcagcaagagcaagcaccagggtcaacccacataataaagcagcagaggaataattttcttttttagaaaaaagaaaaacctaatataaacagaagcgctaatatttttcactcatcccagtgagtggaggtcatcaccttccaccatggagaccttgacctatagggtggatgagcggggaatggtgggcaaaactccaccaaagagagctgcttcctcccagactgtctcgctctaacccctggactgcgacttcaggctgaggggctttacctaggtcagaaacacaggctaatttcccaagaacacatcaaacacaacaggtcaaaatgaaagccatctttcccatccagtctactcactctgctctgtcctgatttctacccacaagctgctcagtaaccggggaagaaacccaggagccctgaaaactgctccctttgtcttatccccgactcccccaccaactgacctgctcgcccactccacacagccagtcgccaagtcctgtccactttccctgctgaatcatcgtgccgcatcagctgagtttaccccctctcctagagtcccactcctggtctctcagctcagaaccatttctttctctgcatcatttcttacgtggatcacctaagctgcttcgagactgaatctttgcttgaaggcagagctgatgactttggagccttcttcatcccgtggttgatctgattaccaggaacttttcccaggactaggtatacaaacacagatcattcaattctctaacagatgaaggctgcggtcccctataagatgcagtccatcatatgatgccctcttaattacttttatgacatgcagcaatcatacttcattagaactcttctctttcttctccactaaactgtgagcctcctgaggacaggaactgtgctggtttccttgtacacagcatgatgccaggcacacagtagacatttgatacttgtggtatcaaatgtgtgtgtcatttgagaagaggcatcttcttataattttttttttaaaagagatggggcctctctctctttcccaggctggagtacagtggtgcaatcttggctcactgcagcctcgaacttctgatctctagcaatccttctgcctcagcctcccaaaatgctgggattgcaggcatgagccaccatgcccagccaccttcttataattatatgtgcacccccaacctcaagcacttgacagctgactgctgaaggaatgaatggatgaatgaaggaataaatggatgattgccaacagccctcaaataaacagaagagcaggttttataaggctgcttctcagagtttccataaatgccagctcagggaacattaacccaagtcccatttgttacatgaaagcagttctgaggtagctgacagtgccatcctccatctggcttaattcaggaataaatttactctacaataatggttggactgtatacatttcagacaaccttccatgagtatggaggttgccattgagatgtccatctgtcctccaccttagggagcactaaagagaccctaaaagttggtctctttgttttacattctaatcactttcctcaaattcacattgatttttccaatgcttgtatagctttttgtggagcaagctttttttttgtttttttgtttgtttgtttgtttgtttgttttgagacagagtctcactctatcacccaggctggagtgcagtggtgcagtcttggctctctgcaaccttcacctcccgggttcaagcagttctcatgcctcagcctctctagtagctgggactacatacaagtttgagccaccacgcttggctactttttggattttcttttcttttcttttctttttttttgagacagagtctcactctgtcgccaggctgcagtgctgtggcacgatctcggctcaatgcaacctctgactccctggttcaagtgattctcctgcctcggcctcccaagtagctgggattacaggcacgtgccaccacacccagctaatttgtgtattttttgtagagatgggattgcaccacattacccaggttggtcttgatctcccaacctcgtatctgcccacctcggcctcccaaagtgctaggattacaggcatgagcgactgcgcccagccatttttggatttttttactagacacagggtttagccgtgttgcccaggcttaaactcctgtcctcaagtgatctgctcgccttggcctcccaatgtgctaggattataggcttgcgggattacctggcctgcaagtatatttttgaaaccaccttactgaggtacaactgacatacactaaacatattaaaactgtacaatgtgatgtttcgagagagtgagcatatccttcctcctgcaagtatcttcctgcttctatgtaattcctcccatccccacctccactcccactgtaccccaatctgtttcctgtcactattgataagttgagcaagtatatatttaatctttaagagcttcctcgctttctgttcccttttcataaatttcctgctttttaaagtattgctttattatcttatatctctctggagttttaatttgattaaaatattttttggtccccggagttattctctgcagcctccaaaacagtcttactagtttatttgtctggtctgtctcatttagcttgcattctccttgcatgtctgtggagcctttatttatctaaggacactaggtagctaacatgcatttcctttgctattgaataagattgtttccccaaggtgagtggcagctctaagcaaggaaggatggagtaaagcgcctgtctggctgtagtgagggagacagtgagtcagctgtcagcctgtggacccccaaaatgccaatgagggcatatctgagacagggtaatttataaagggaagaggtttaatggactcacagttccacatggctggggaggcctcacaatcatggtggaaagcaaaggaggagcaaagtcacatcttacatggtggcaggcaagagggcttcacttgggatgcagcattgacgaagaatgtcatagcttctggcagacgtttgttccattcattggaagagccatctgggattttgcctgattctgtatgctgtatatacacatgtatatgtgtgtatatatatgtgtttatgtgtgtattatgtgcacatgtgcatgtgtgcatatctgcagcatgcatgcttgtatatgtgtagtgtgtgtatctaggtatacactgtatgtatggaaggcaaatatattgtatgatggaaggcaaaggaggagcaaagtcacatcttacatggtggcaagcaagagaaagcatgtgcgagggaactcccctttataaaaccatcagatctcatgagacttattcattatcacaagaacagtatgagggaaaccacccccatgattcaactgtctcccaccgggtcccttttatgacatgtggggattattacaattcaagatgagatctgggtggggacccagagccaaaccatatcaccccctcctacaatgtggaagcaccactgccattttattttataaacataaatgtttttccttctgctaccaccatgcacctgttttttattagctgtggccagaagacagttgaagttgtaggttattttctgctctaaacatagactctttatgcagcaagttggaggcagatccatttctttgctgataccgtggcctcccttattacaatggaagggccctttgcaggatccctgtggccacctcacttttatgtcaggaacaatcaagtttccttagaaaacagctggatccccaatgttgcagatgatgttttgatgaaaatgttcaaggcattcttttcctttagccaacttccttgataaaactttcccagtaaacatagtcttaccatatgatccagcaattgcatcccttggtatttacccaaatgagttgaaacttatgtctgcacaaaaaatgtttatagcagttttgttcataattactaaaatgtagaagcaaccaagatgtccttcaataggtattcacctattgataaacaaatggtgttgtaccataccatgaaatattttttaatgatagaaagaaatgagctgtccggctagggaaaggcaagaaggaatcttaaatatatgctgctaagtgaaataagccaagatgaaaaggctatacagtgtataatgtcaactgcatgacatgatggaaaaggcaaaataatggagacagtaacaagatcaataaccattgatccaggagttagggggagggaggaagaggtgaatagtgaatttttaggtcaacaaaactattctgtacaatactaaaatggtggacacatgtcattacacatttgccaaaactcatagaatgtacagtactaagtgtgaaccctaatgtgatctacggactcgagtcaataataatgtatctttattggcttatcaattataacaaatgttccttagtaacgcaaaatgttgacaatagggaaactgtgtggcagaggaaaggggcacctggaaaatcaatatattttccattcaatgttttgaagacctaaaacttctttaaaaacaatctatcactttttcaaaaaattgtcgagtaatatgcccacaaaccacctgatttaaagtgggaaaataaacctgccagaacaaactagtttgcaaatcgcacctcttcaaggtaatatagaggacatgtgttaaaagaatgatttcaattttagagtagcgaattgtgagggtttttctccccttaaatgtgcagagaataaaatgcatttgtcttttggggccactccaagcaaatggcaagatgagggagaggaagctgtggaaacactaccacctagtggtagaagacagactttcaaaaacgtggcctaaggctttgcagaattcattttccaataactttggggacatgctcacaaccctttataaaagctgggagaaagaagaaatagaggaaggagagagaggtaaatggctgcccaagtggttaggaacttaacattttccatcaggccgatcaacctagggagaatcatcagatctggagagttcagaggctgctacatagacaagagacaaaaaaggcactgcaggacctgcttgcttaaaaacgcccctgccccacagtactgcccacacgtactggatgtgaattcccacagtaggcaataggccaaaaaatgtagggtaccctcatgcaatgagtgcctagggggtgcctgttctgggccaggtgcccctgtaggcattggggataaatattatatccaaaagactgtccctatcatctggaaataagggcagctttcaagccctccttcctgagtgcagaaagatgtatccctttgatcatgaaaagtgtgtgggaggaagactttggagggcaactctggagctagggagggctcctggctaagagggtgtgttcaaagggacatctccacccagggtgggaagacccactgggcaagaagcagggaggtgatggaaagttagccatggcctgcctttgcttcaggtccgaggggggcgggggtgctaagggcaacacagcagactcaccagcctctggtgaagtactttagctggttagtgagtggctggttctaagttactttgcctcagcagaggagaattcctatgatgaagggaatccaggcagcatcagcctccgctgcccctttgtcactgctgagctgtgcacacctagactgccctgtgatcactttcccaaagctgcgctaatagagtaccacaactgggtggcttggaagaatggaaactgaccctttcatggttctggaggacggagtctgaagcccaggtgttagtggggtcatactccctgagtatgaaagctcaaagggaggagccctccctgccttttccagctttggtggctcctggtgttccttggtttgtggctgcatccctccaacctctgtctccatcttcacatttgactggcatgttatgtcacatcaggagaacacagcagttcagtgtcggcatttctgtccctttggtgtatctatgaatgtgaggtctttcaagctaaggggaatgtctgttgagctctttctgcgccaataaggggccagcttggaagcctgcgtgcctgttgacagctaccctaatatattgttgataatccgaatggactcctatgaaacagaaaacagcaggtgatgtcatttgctcataaatattgaatgcctctgctcaggaggatggggactgaagttccatccaagcagctcctcaatgctcgtaacaaatctgaacttgctctctccactggaatatgagcaggttctctgcattttaacaagtggacagtggttatgctgcttctgggggctcccaccctgagaaaggttcatcatagcctgatcttgaagggaatcaataatcggtgtccaactgaaactgggttgtgtcgattaaagttgtggactgtaagcaaatgcctaaaagacctctcgttgacagtgaaataagaaaatgaaaatgccttatgaaattctgaggctgttgaaactttatatctgggcaatttcaccagagagctccgtgccacaaatggaaccaactgctttgagggatagtaatgtggatgtgtagcaccagctccaaaatgacagtcccagagatgccctaggtgttgagttgtgggatcaaggggagagctgtgacagagaagtcaaaggaagaaggaaccgaggaaatccccaaatgtgatgctcccctgccacgtaggtcatctgcacgctgatggcaagacttggagccatgagctgtgtcacctgttgcatctccttcctcctcccacagtgctgtcccactttgctgatccatttttctccataacatttatcatcatttcacatagtagatttgtaattataatattgtaaaatattccatttttgtgcctgtatttgttaactattgctgccataacaaatcataaacgtagtggcttgaaacaatgcacgatttttatttatttatttttttacgattctagaattcgaagttcccactgggtctcactgggtttcactaaaatgaaggtgttggcaaggctgtgttctgtttcagaggcagaatcaatttctttttccttttccagcttctggaagctgcctgcaccctttggcttgaggctctcctctatcttcaaagccagccatcccatcatctcgacgtctgctttcatcacttcatctttttttgtttttgtttttggagacagagtctcgctctgttgcccagggtggagtgcagtggcacgatctcggctcactgcaacttccgcctcccggcttcaagagattctcatgcctcagccccccgagtagctgggattacaggtgccctccgccatgcctggctaatttttgtattttcagtagagatgggattttaccgtgttggccaggctggtctcaaactcctgacctcaggtgatctgcccacctcagcctcccaaagtgctgggattacaggcgtgagccaccgtgcccggcccacttcatctctttctctgaccctgaaaactcttctgccttcttttgtcatcttttaaggacacttaagactacattggcccttcatagacaatccaggatcatctctttatttgaaagtcaggtgatcggcagccttcatttcatctgcaaccttcattcctctttaccatgtaacattcacagattccaggaaattagggcatgggcatctttcacggggatgtgaagaaaaacctcaaagcatttttccttagccctcgcatcacaacaacaataaacacagaagacttctgtggccagctcggcatggtggctcacgcctgtaattccagcattttgggaggctgaagtgggcagatcactcgaggtcaggagttgaagaccagcctggctaacatggtgaaaccccgtctttactaaaaatacaaaaattagccagacgtggtggtgggcccctgtaatctcagctacttgggaggctgaggcacaagaatcccttgaacctaggaggcagaggttgcagcgagatcacaccactgtgttccagcctgggcgacaaagcgagactttgtcccccctcaaaaaaaaagacttccgtgaccaaatgtgtgggtattatagggattacttcccacacaccagcaagcaatcaattctgcgttctgcagcggacaccagctgggtgtcctccaattcaatttaattctgacactatctacccagggacagcctcagaaaccacgggcccagggctcagtcccacaagagtggcccctcctcccacctgccccaagtccgggtctcaggaacttctgaccaactggtttccagttgagatttccaacacccccttcggttttgattaatatgctagagaggctcacgaaacacagggaaacacctatgttcactggtttattacaagggatatattaaaagatacagagaaacagccagaggaggagattcacagcatgaggtctggaagggtcctgaacacaggagcttctgtccccatggagtgggggcccaacactctcccagcacctggatgagtttctgttcactttcctgtccacctccatgtgctcagctctctggaagccactggaccctgtcctttgggccttttatggagacttcattggataggaatgaccaaagcatggacaaccacatataaatgtgactggaggccgggcgcagcggctcatgcctataatcccagcactttgggatgccgaggtggacggatcacaaagtcaagagatcgagaccatcctggccaacatggtgaaaccccatctctactaaaaatacaaagattagctgggcatggtggcatgaacctgtagtcccagctacttgggaggctgaggcaggagaatcagttagacccaggaggcggaggttgcagtgagttgagatagtgccactgcactccagcctggccaaagagcgagactcaagaaaggaaggaaggaaggacggaaggtgattggacaaaaagagtgtgatctaagcccagcaagtcctcaggctcttcttggcgtctccatgcagtattccttcatccaggttatggggcaggaccctctctggaataagagtttcaagacccacaattaagacaggtgaaaggagatcaggagaaggtcagagagattctcttcactctaacaagagctatgggagttacgagccagaaaccacggacaaaaaccagtatctcataatatcatagggggccattattctgcccaccacagcctccttcctcaaatgtaggcttcgtgaaggcaggaatttttgtttctattcttaataaaaatacaaatatgatgatgccactgccctacttgtcctccttctctaaatccatatagagtcaaacatccttagcagcaggtatttgctggggttccctcagaatagccctgaagttaagggtttgggtgcaaatgatgccatcctgggaaacacaggcaggggaacagggaagtaagacaggacgcagcaaggagccatggaccgccattgttccatggtggcacaacatggtggagccctcttgtgggggagtgtggaacaccctcagagttgcccacccaaagggtaaggaggcaggggtgtgtgtctgtcctcccactcccattgaggtctgttgctggtgtcattaagtatgcagcacttccagcctgtcccccagggaagctgaaacagccttcaggggaatccaacgtacctgcagcaggacctccaaggcttgtgagagcagaggggattcagggattctgtggggcacccacagcatctctgcatgcagctcacagtgcccatgagatctgaacatgcatttatcttgtgtaagataaggctatttcccttgtagttggtgcaaaagtcattgtggttcttaccattaaaggtaatggcaaaaaactttttttttttttttttcttttttgacaaaattttgccctgtcacccaggctggactgcaacctccacctctcacattcaagtgattctcctgtctcagcctcccgagtagctgggattccaggcatgcactaccatgcttggctaattttttgtatttttagtagagatggggtttcaccatgttggccaggctggtctcgaactcctgacctcaagtgatccacccgccttggcctctcaaagtgctgggattacaggcatgagccactgtgcccggtcagcaaaaaccttttaatatttaaaaacattaaagttttcacctttaatggtaaaaactgctattacttttgtaccaaactaatatttcccggtttttgaactgaaaatcctgtcttcttgaaacactcccctcagtccgggcaaactagaatggttgttcaccctgtctggtactgactcttgcagtagacaaagatgagatgatttacaaggtggcatttaaagtttgcaactctgccagcagcactgggggctggcttgtctacactgtttcagggtgtatagattgatagtaacatctgctttaaccagttacacagcctcatctgcctctaaaagatccctctgcagagttgcaaaagctccctttcgatcaaggtaatgtgcacacatttggtgggtcattctgaagaccgagttcacgctgtgcaaatgagaaaggacagcgagggtttgtgcctaagttttctagcctctcttaggttgcctccattctcttttcctgacgtgctctatccctcacctttattaaagctgtagatgagtgcacctgtggcatacctttgagtccttccaatgattccatcctagaaggatctgctctagcctgatcactcaccccttcctttgcaaactcctcaaacaccctagaaatagggcatttctagctctattgacttgcttgtgtttggaatcatgccaggatctctcctcgctctgaaccttggcattacccttagattcccaaatgtctcgtttggccccttaaggcttataatggtgcccctcttctgtgctctcagagctcttggtgcttgtcctccactagcatttaccagcctgtgctggacttgcctgctttctggcttgaaccctccgggactgtcttaatctgcttaggctgccataacaaagtaccaccgactggtggcttcaacaacagaaatgtattttcccacagctctggagactggaattctgagatcatgggactagcgtggctccattcctggtgaagactcttcctggcttgcagacagctgccttcttgaggtatcctccagtgcagttccattgtgtgtgtgtgcagagaaagagggccctggtgtctgcttctcttctaatatggtcaccaatcctatcaatttaggatctcaccccataaccctgtttagctttacctcctaaaaccatagctctaaatatagtcacattggaggttagggcttcagcatatgaatttgagaaaggggacacaactcagcccatagcatagactgtaagctccctgagggcacggactgtgcggcattcatcattgaactcccggtgcaataattggcaataaacatttgccgagtaaatgaatgaataaactgatgaggatgtcagagtcttgctgcactcttcacaacacccctctgaggtgagtgagacctcatccattcactgcaaccttcttctgctttttcctctctacagagctgaagagacagaaactatttcccagcctgccttgcaaacagggctccacatatgatttggaagctgctgattaggtgcagccatgagagagctgactttggaactgaattaagtgcgaagggagtggcagtaagggtcatatatatttttgttggtgcagatctagtcggtgtggaggggccatgggggtaaacattgtcatggtagcccctgatctccatcacagttgaggtgttacatcactggaagcaaaggttgattcagaggtcctggggctgtgccacttcctgattctagagttttgtgcttgagttaaaagaggtggcttccctggtgggttagtcctgcagtattgttttatgagtctttcctgcaggcctcttctctagcctgcttctttgacccatgtgaaggttttgtgagcacactactcctatatgaaatccatttctgcttaaaatagttagagtggttcctgtgactgcaagggaaccttgcctgaaacagatggaactatcaagcccatcatacagatgcatacctgaaaaaatgaatggctactcaaggtcatagaggttgtgatgtctcagctggtgtttgaacccaggtatgacctcagtgaagatgaggaaggttggtccacaaaaatggcattgtatctggaccaaagttgagaacaggataaactggtaaagggaagacagaacagtgtggggatgggaacactaagagagtagatgggctgggttcagtgactcacgcctgtaattccagccctttgggaggccagaggatcacttcagcccaggagtttgcgactagcctgggcaacatagtgaaaccccctttttatttaaaaaaataaaaaggaggagagaggtggagcaagatggcagaatagaaggctccacccatcatccacccagcaaggcaccaatttaacaactatctccacacacataaaaaaacacctttgttagagcccagaatcaggtgagcactcacagtacctggtttaaaaaacaaaaaaattagctgggtgtggtggtgcgcacttgtggtctcagctgcttgggaggctgacatgggaggatcccttgagcccaggagtttgaggttagagtgagctgtggtcgtgcctttgcattccagcctgggcaacaacgagagaccctgtttcaaaaccaaaagggagaatggattaccacaggggctcgacatgatcaagtcagtttagtaggaacgacatgtgaggcatggcccggtcacaggcatgaaggttcagaatatagcctggagtacacatgtatccctctgggccaggcagaggcttcacatcttggtgaaaggcctggtcgcactttctctgggtttcagatggactgttaatgcaaagttgtttttgtgtttttgcaaatcccaggagctggtggatggggatggtgtgaccctgttggaacctgctggctggcagccctccttcagagagacaccgtttggaaattaccagaggcctagagcaccaacccctccccagaccttggaagaattcaccatgatcccctggtaggttcaagtccacagaggatggattctgaaggggaacatgcaaacccatcagcaccaacccagagctgttgtaataagtcatcactcctggggcagggagacttgactcttcccctgatgattaggagttttgttgtcttttgatgttcccaggccagatgccacagttaaattagcaaaagaactcaaataaccctgaatagaagaaagaggagactctcgttatgatgcaccaatgattggtaaaggtgacttcccacagtgctgttttgttacagggcaatttgccagggttgttgaggccaccatgttactcccagcactacagtgagatatatatatgtacttactggaagatctgcaatagtgtaagatgtactattgcctctttgagcttttggacagatgtgtggctttaagaactgttgtgcaccctgcgccagacagccaactcatcggagaccccgaggaaacagtcagtcaattggtaaaggtgaccatacatatccttattcccatgggaattcaggtgcttggtttatcagagtagattgtcactaaaaatgtccaaactctctgatcatctttttttttcaccctcaccacccccatgttgatttcagacttctagtctctggaactgcaagataataaatttctgttttttaaaaaaattgtggcaaaatatatataatatttatcattttaaccatttgtaagcatccaatccggtggcattaaatacattcccagtgttgtgtaaccatcatcactatctgtacctaaaatattttcccccattgttaactctgtactcattaaacaacagctctgcctctccaccccgccaacccctgcccctagtaacttctattctactttctatctctatgaatttgactattctaggtccctcatataagtgcagttacaagacatttgtctttctgtgcctggcttatttcacttagcacaatattttcaaagctcatccatgctgcagcatgtatcagaatttcattcctcttgatggctaaacaatgttccatcgcatgtgcatactacattttgttatccatttaactgttaatggacactggggttgtttttaccttttggctatcgtgaataatgttgtcacagacgttggtgtgaaaatactggtttgagtttcactttcagttcttttggatatatactcagaattagagttgctgagtcataggataattctatgtttaattttttgacgaaccaccaaacttttctacagcagttgcactgtttaatattctattttatttttcttttcttaagcaaaaaagggaatatgttgggctcatgtaacagaaaagtttggggtggaaccaatatagcttgcttcaggagtctcttaatctctctgatctctctccatctcgtccctgccccctcccactgcatgcctttctcaggctccacgtggtgacgagatggttgcagcagctcacacaacctgttctattcaagttcatgtccattgactctgtgagatcattggagaaactttagggttctggcttactagaagggtgactagattctggatggcaaagaggacagttgtcccctacacctttcccactcctttaaatttcccccacctcaggacagcttcagcctctccagcccagctccatgtccataaaccttctggtgttcaggaactcaacttctccatcacttttaattcttccttcttgcttgaactgcacatccaatcagttccactgccctgccaattcttgctttgaaaatagtttttcctctgagtcacttccatggaaagcattcatgattcaggtccgcgtaaagtggttactacaagtgcctcagatgctggcagtgataatgcatcctgggaggtctacactggtaaaatcgtcacctaacagggggacgggctgtctgtagaagtctctaagatgggttggtccctttgaggctggaaattaaaaaaaaataaaatttaaaaaaaagttttcctgtattaggctgacttgtcccagaggcagcaacaggcacagcccagacccaggaaaggtcctaataatgttatctaatgtgctctgaagactctcccagcactccctcaacatagaaaaaaaaatttcctttgttttatgaaatgagtttgtaggttcctcttctctgtaactagtgacttcaagtattctgttttctctaagaagtacaacaaaggtcataagaagcttgagtaggcccaaactacagctgcctgggcaccatagtaaaggttataggataagcccatgcccaggcaaaactagataacggacatctgggttgcttggcaacggtcatgtgcaatcctgtctttgtcctgcctcagtatccctgctttcatgccactgtaagcttacttcaagctagcccacccccttttgtaaagtgtgtataaaagtcaggtgctgtctttgttctgggcccagtcttttggacgttgagtcagctgggcccgagtacactcagtaaaaactctcctgtttcaacctgaggtctctctcgtcctcctgaatcctgcaccaccttctccagattaatgtaagcttggtcttaggaagtctcagtggacctactgaacttaggagaaacctgtggcttaggcaatatttagaacagctgaagaaagatcaagggaacagcatggagtctagaatttttttaaaaagggagaaggtcagaaagtgttggacacagcatctcagcacccagggccattgaggctggcactgtgttttctgacttctctcataatcgatgataaatgcctctttgtacccctagtccatgttttccaagaaacctactgattatgaattgacttcccagatacctggatggcagaaaagcagtgccttgggtggtagcctagagtgccccgggatctgttacaaaagtccattgctcagatcattagtagagaggaaaaggcaccttgaagggcttgagagcaggtgcagggctcacagtaaagcatggtccccacccacaaggcaaagcttcaggatgtgaacccagactcatcagtcacccacctgctgcctagtcatgtgtgatgcctttggggcaggcttccttcccttaatgtgcagattcaagtccccacctgcctttggtcatgttgtgattcctcacaatgtccaaaggtctcaaatctttggcttgaatgggctcacttcaaagacctacagagctgagcttggtattgaagccacagaatcaaaagtttttgtatctcagttgcaagacctgtgaggcagaggtggtcactagagccacagcacgctagtggaacaccagccctgggactttctctgttctcgctcactccctcacttttcactttctttagccatggctggctgacagtgcgtgcaacttccagtccctagggaaccaagaaggagtgctcaaacctacagcctcctgggttggttcccagctaggagagagcaccagcggcaagtcctgcctggctctgggtgctgggtgccaccatcacatgtgccatgggtgatgggtgtggttggctgtgaatggaaatgcacgtggtggaatgatcccaggactcagccctatagcagagaccagtctgcacacttcctgcccatggtgtggctgaatgatagggagacaaccacagtgaccacaggaatgactattacgcctggcaatttattcagatatcagtgagagcattggatgtctctctagatgcacgttagagggttcaggcctattttagtttatttttgagactgggtccagttatgttgcccaggctggtcttgaacttttgggctcaagagatcctcagcctcctgagctgggattacatgtgtgcaccaccgcatctggctgggttttttgtcacaaaaattgtagcaaaagaattgtacctatgttcatttattttaccttccaagtcctttttccattaccatttatgatcttataaaatgccccctagtgaacaagcctggctgctaatttataccctttcctctgaagagcccctctacggtagaagagtattaatgacacttgcagggaagcatgatgttgccatgatatgaatagctggatgttgcctttgggggtcagaacctagagatgatgctcagagtagactgccactgagggactcagggatccaggaacagcctaggaaagaagaagacaacaggaaactctagaattctgctcagagacaccatctctgctgtttttctctggactcattggagaccagagctagaggtctctcatctccctctttcctggcctgcgtgtcccaacacaacgtgtgcttgcgtgtgtaccccatctcacccttttttactcttctctctctcttccttttttcacttgaaactgtcccctggaaaccattccatagtgatatagggaacaattactcactcatctccattgcgcgcatatatcctgatttactcaaccagtttctaacttaaccagttccttattgacggacatttggtttgtttcctgccttttgctaataaaaacagcacttcagtgagtagcttgtgcacatatctcctttgcatttttggccagtgtacttttgagaaaggttcctaggagtgggattgctgggtcaaagagcaaatgcttatacaattttgctggataacgtcaaactcccctgtatagtataataccacgcaattcacagttttcattatatgtttctttctcttatgctgttaaaccagaaactttatgtttaacttattggcacaagattccattaagagaaaaattatatggacagactaagattttagttcccattacaggttttattcaatgtatctgtgaaatgaagttgtttttttttttttttttttttttttttttttgagacggagtctcgctctgtcgcccaggctggagtgcagtggcgggatctcggctcactgcaagctccgcctcccgggttcacgccattctcctgcctcagcctcccaagtagctgggactacaggcgcccgccactacgcccggctaattttttgtatttttagtagagacggggtttcaccgttttagctgggatggtctcgatctcctgacctcgtgatccgcccgcctcggcctcccaaagtgctgggattacaggcgtgagccaccgcgcccggccgaaatgaagtttttatgagttcatgaaaacaagccaatttagctactaagttacctcttacaaaggggccctaatgccataatttcagtgttcacagctggctatttcagcatcgttaaaactattgcactttgaaattatttcagtgaaaaaatgcgtgctgtccccagggggaagaatcctggtactgaagtgtcctctgatggcattgcatgttcctcaaatcctagagaaatggaaaactccctcctggacagggcattgaatttcctccagcatgaagtcccctttttgctgatgaatcccactttgctcccaaatctaggactcagggttctgtttgccttacatcacctccaaaggaagccggctggcaccaagggccagcccctggaaacttgggaagcgtttgattccacttatctgagcacagaagcagcatgccagcctgcctgatacagtcaggtgcgtcatgaattccaaggctgacccaccaaatcagggagcttgggtcccatgatctagggcttttgccagcaagtcaaggccttaaattcctggaggctgatcacctgccaaaaaccacttcacagatgaacgtgtcctgaaagggggcttatataccttggatatatgatccgccctcctgacaagccacagcagcacttaaaaaggcttgtgaagggatgatgccagtggaagaaaacaggaactttgacctcccagagcctatggataccaagaagggatcagatgactgattttttcaaaagcttcctggtggaataaatgcatttcacaggtaagccctggaacaaaacaaggctcactgaaacgagtccattgttggcttcagtaaagtctaaagggaaggttgggcctttttaaagaaatagggtctacatcagttgtgaaaattttacaagaagcatgtgaaacatgcatgaagtacagtgtaggaggtatatgaatcagccagaatggagttttaataaagacgctgcagattcattaagaagagaattcattagaaaaaccctgagttggccgggcgtggtgggtcatgcccgtaatcccagcaccttgggaggccaaggggggcagatcatgaggtcaagagatcgagaccatcctggccaacatggtgaaacttcgtctctactaaaaatacaaaaattagttgggtgtggtggtgcacacctgcaatcccagctacccgggaggctgaggcaagagaatcatttgaacccagaaggcagaggttgcagtgagccaagatggcgccactgcacttcatcctgatgacggagagagactctgtctcaaaaaaaaaaaagaaaaaaaaaacccagagtttacaaataaaggccagaagggattaacgtttggaaatctgaattgctaatctctttaaaaaaaacattttttctttctttattattattattattttaagacagaatctctcactctgtcacccaggctggagttcagtggtgtggtcttgactcactgcaaactccacctcctgggttcaagtgattctcctgcctgtctcctgagtagctgggattataggcgagtgccaccatgcctcgctaatttttgtatttttagtagagacaaggtttcaccattttggccaggctggtcttgaactcctgacctcaggtgatccacctgtcttggcctcccaaagtgcagggattacaggcgtgagccacttcgcccggctaaaaataatattatttttgaattggtaatcagtgcacaggaatcaaaagtcaaaaacactctacaaaagtattcacagagttgaatcattcccaccctcacactttcccctacataaccatttagatcaatttcttgtttactctttcagtgtttctttaagtaaatataagcagttctttttttgttattttcgcagcattgagccgccagccaactctggccagtggtgccctgtagcctttctgggaatgtgggaaaggaaagaagagaaagccttgagcaacactggctggtcgcatggtaccagtagtactcccccacatgctgtgacaaccaaaaatgtctccagacattggcacattgcccctggttgagaattgctggtggaaaaaaatcacagccccgcagttggtcaggcccttttcagacaacaccccccactccattactctttgatgttgagcccagcacaattttcaggtcctggactcccaaggttggagcctccacttttcaggaagcggttgcattcgatttcaggaagcggttgcattagatttgtagagagtgggggccaaggcatcatccaggccaccttcatcccctgggactgctactgcatcctcctaactcatctcctgcgtgttctacatgcacagcggtccataccaccccacagtgggcagccccttggggtgccttaatgctcttcggataaagcccagactttctgatggggcttgtggggcccttcaaagtgcagtccttggctgggtgtgtagctcatgcctataatcccaataccttgggaggctgaggtgggaggatcatttgaggccaggagttcgagaccagcgtgggcaacacagtgagaccccatttctacaaataatagaaaataaaaaattagccaagagtggtggcttgtgcctctagtcccagctactcgggaggctaaggcaggaagattgcttgaacccaggagtgcaagactttagtgagccatgattgcaccactgtacctccaacctggtcaagagagtgagaccctgtctctaaaaatgaaagaaatttaaaaggtaagaaccaagggaagtccttgcctgcctctccaggcctctcagttgcctgctgtccctgttcacacttggctccatcctcactgagacaacttttttccctggcatactccttgctctgggtttttcccatgccctttccttgcctggaatgccatctcccacctttttcctggccagcaaaacctctattcatccttcaggtgtacctcagagctgaccaaccctccccacatctacctggcctggccctgggtcccagttgggcactcctcctaaatactcctagatatgcagaacatttacttcctcatgttgtcattgtttgtctaattgtctgaagccccccaggaatgtggctgcacaaggacatagactagatggccttgtgacccctgtgtccctggccccagcacagtggctggcaaccagcaggtcccagtgcatgactgctaaatgcatgcacacatggcacaatgcttgcaaccaggcacatgcttccccagccttaggaagggttacgttcatggggttaggttcacagacgctggagccaggctgtctgggtacactctgcactgtggggctctaccacttcccgacggtgtgcccttgggcaaattgcttaccttctctatcccacatctttacatcgttagcatttacgtcaaggattatattaatcatatgagctaatgtatgttatgtgtttatagtagtgcctggcatatcgtcagcaccataaaagagtttgctgttctagcttcaaaactcttcatagaacttacactcggtaacaggataagaattttgatttcaggagggatggcaggtgatgggatgatgaagggagggagactgggcagattggagggagactgggcagattgggagttcctcatgtgtaagaggaaaccaagagcctgcaattctcaagtataacattacgccctcagagaagtgggtgggaagattccagagacttgctcattttacaaacatttatggtagattgatttggggtccaagaaaggagaatgaaactctcttttttccatcctctcctttcggccctctcttcccaggactcacatgaatgaacgtctctggacacctaatcaccatttatcaatctcacttctatgagaaaaacacatttcaagtacctaccctccagcttgtcaacaaattcattaaaaaagaagggaacatcagttatataaagccatggtgtttttgccttactatcaagcttttggatgaaatggaaaagttaaatccgcccgggaggcatttctaactctccacatttagccacggaatagttagactaatacctgaattctccatttacattttcagcttgcattcacagatctggagtcatagagaaattactggtgtggtgtcaagtctaagttttaatgccttgaggggaagcaacttcacaattctgaacaaggttatcatgagtggaggagaaacattctcctggttcttgagccggagttcatgagctcacactttggcagatctcatcactgatcatttgagctcacacagctccaaatacaatggaaaccactgggttatttgtcagctgttgagttcatttggttgtttaaacaatgcaatcatgccagtggagtgggggcaggcagacagcaaacactggctccgtgcaaacctgtgctccgtgccccgaacaaggcaagggcaatgttggcctgatgtaagggttctgctgggcacctgctgtctcagacacctcggttgaactcctagctctgctgctttccagagttatttgatgctgcagaacgtcagtctgcttatctgtaaaatgggcatagtgattttaattacctcacagaggcctaaaagggaggagtgatataatccacaggaagagctcagcatattaaataatcatgacccactagctatgactgctactgtctctgggggttcaagagcagacagtagaatcataccaggggagagacctgactagtatgagccccttgttgggcttttggactttgaaacagggtgaggaatgaagcagagagagggatgataaattgctttgcacaataaatgaagagggatttgggggttgcaagcgggcaagctgagagaggattcgggatgacatgggcagggaccagcccccaacccgctgcccatcactggccccaaaccttgagtgagcatctcccatagcaaggagctgtggatcctagttttccaggatagcctcatggtttgcacctgtggccccagagtaatcactttcactttcagaagtgtttgggtttggctataaattatgtcctaactatgtccaactgccttctgggaggtggtatgttagaaaaaccacagaaaagaggctgcattcacctgggctaagacaaggaggagcgaagagagtagcaggtggaggtagggttgagatggggcagatgcaggtggttagagcagagggagccaggtgagactgagagagagctagaagatgaggaatactcaggtaactagcatatggattacatttagagtattttaagatacaattcacatatattgaaacacaaaaattttataagcccccaaagtcccctgtccctctttgttggcaatccttgttccccgctttctacccttggccaaccaatgatggtttagacttggaaatagtgtcttataagtggaatcacatggtatgcagccttttgagtctgcctttttctacttttcataaatgcacttgtagttgatctgtcttgttgcaagtatctgtagcttattcttttttaatactgaaacatctgtttatccattccccagttctaagacttttaggttgttttcattaattgtcttattttggcaaatcagttcacctgtgtaacctgcagtcctctcaagagaaatgtaggtttcacgtaatgtaccacagagaaacaaattctagtttaagggttcttaacttcatctgatttatgagccctttgctagtctgggaaacccttctttgaataatgttttcaatgcaaaaatcaaaatgcataggatctcaagggaagccaattatatggatacatagttatcaaatattaagaaatatgtgatacagacacataaggtgtttctttatgattacaataaataagatcaagaggcaggtctaataactacagaaatttccaagtagtgatgagtgtaaataatattttgagatgactaacatctgtaataagttataaaaaatctatgattcttcttggggacaaagtcacaagtacaattattattattaccttttatttcctatattcataaagaaaggaaatgataaatttcagtttgaggttggtaaacataaaaatatgatttttccttatgaactttttgaattctgtttatgtatcttttggggactttgatcatgccaccttagaattagatgatccagctcattttgttgctacaactttagagggaagcggggggactcctttttgctgactcccattctgcagacatagaagtcttttctctgcagactcgcatctgtggattagtgcataacccacctatttcaagcagctacatagtctctacttgttactgtgactccagaaacttctcagtttacaacagtctaacaattatgccttcaaatctgatgcaagagaacttgaacaaagcccccaaagtcctctgataggtgaaacgtccaatcttatctctactgaggagagctgccacctgaatttatagcagtgtacactcacttaaagcaaaagtgaaaaaaatacaaagaagagtttagctaggcatagaaaaaatgcaatgggtattttgtgagttctgagtttctcttgaaatgtgagccaatttgattctgggaaaattcaacttccttgtttgaagacagcttatgaaatggcttttgagttttatgtataccaaatgcttctgcactcacccaacaggattttttcaggtgtaatgcatatacatgcaccagagagttacagactagcaatgccctaaaaccacttacaaggataaataaatatgtccaaaaaaatcaaatcttcacaaaatatggttattttgaagtatatctcatctcccattttctcactccacaaaaaaatctaggaccttcctcacttcctatcacgtgcccaacttacttttagacgtaccaagttccatatggtcagaatgtacctaaattacattcactcaccagagctctcacatggggtaacttcaaataattgtcaaagattctctacaagaaaaatagattcccacttggtcttagatgccttaaaatttttaatgagtgcaaagcttttatttctcaaagagagataggatttaaagtatctcttttatttctcaaagggataggatttttggggtgattgctcactgacctaggttcacttgaaggtatagatgtttggtccgtagagcagtattcccaaacctgaaagaacaggaggcattactacagaacctacagaacagacaacagggtcctgcatctgagcaactggataaatcatttctgaaaataaggcctaggaatctttcattcagacacactttcctatcaattctgatgcacagctgtttgggcatcactgcctttgagcactaaaaatctaatgaaaaatattttacctttgtgtgttcacagtgtatgaactttgttcacacagattcttacttggtcccaaataaacttgtaaggtatgtagggaagagatcactttccaatagtacaggttgggaaaccaagaattagaggtgttatgggactcatccaaagacatctagagactgaaaacaaagaaaagagggagaaaaaagtgctggtctgcccttgatttacctttttttgtgtatgtgtgaggcagatctttctctgccttccaggctggaatgcagtggtacaatcttggctcactgcacttgaatcctgggttcaagtgatccttccacctcagcctcctgagtagctgagactacaggtgcctgtcaccaagtccagctaatttttgtaaattttatagagatgaggttttgccatgttaacaaggctggtctcgacctcctgggctccaacaatcctcccgccttggcctcccaaactgctgggattacaggcgtgagtcaccactggctcctaggtttatcttaaaattttgtataaaggcaatcccacatgttaataagagattgttactaaatgccacaagtgtcatctgtgaaattcaaggacttaaataaaaagcggagttgttaaaaagctgttttttatttacaaatgtagtcaagaaccttccaaagaggtgttatgctggatggtaagcaagtatttctttctgatttttcctttgttgaaaggagctgccatctacgactcagcagaggaagggctggttggccctcttctgaggctatcttgggctcactgagagacaggctcacaaatggggttgccctagggtactgggtcaggatagaataggagtgtttttgttctgagggttaaaaagaagctagcccacatctaggagtggcaatggggtgtgttgctgctggactgtgccctaatgtcaggctcttggggccagcttgggctccaggaagggctgggtgtgtaaacgcatggaaggattccatgagaactgtgatgtgggggacacctggagggaactggagtcaaagaaagagtcatctcccctctaagttttagcctctgtgggactgagagcaggtctctctgttgaggggagaagtgtcccctgttttgagtatcagcattgggtggaggtgggaaaccagagcaggttctccctgaggaaactcctggggttcgggcaaatcaaaagaagggagacccaagaggaagatatgcaaatgagtccctggaaaggaaaaggaggcggttgcatttaattcttgactttatagatagttcacaagctaagtttctagctcacctccacctgggtgtgaattacagaagaacttgccagtaaatacgtatttgatggctggttaagaaattgcattggctgtgcaaacaatcctaaaacatctggtcagtttagacagaaaatcaagtcaactcagtcaaaatattattcattcatataacagatgattattgagagcttcctattcacccagcactgactcaggtgctgaggaaacagcagtgaacaaaagccaggttccctgccatactggagcttcctgtcttgtgagggagacagtcaacaaatagaaccctgagcaggatgaaaagatggagagcgagcggagtgcttcacatagtacatcagggagggcagccttgaggaggtgaccttagcaagggagctaggtgaagtcataacgtgagttctgcggagacaggggtagagtgctccaggcaggagctcgttcagattgagtgcagcacagtgatggggaaaaatgaggcaggagacagaggtcagagaggggaggggagatgatgcccagttatggagactttcagagccccgggagattttcagatttggttctaagtgtaaattgaagccactggaggatttcagcagagcagggacattatccgttatccatcctattattacgacagctcaggttgttgggttgagaacaggccctagagacaagcatggagcagggagaagagctaagatgctattgcagtgatccaggccacagatgaaggtggtccaggccagagatgaaagtggaccaggccagagctgaagcttggaccaccattgacaaaggtgaatccagctcattccttcagctggtgtgtagacaataaagtcccatgaggggtcaggtgcagtgactcatacctgtaatcccagcactttgggagtctgaggtgggcagatcacttgaggtcaggagtttgagaccagcctggccaacataaggaaactccgtctctactaaaaatacaaaaattagccgggtgtggtggtgtgcacctgtaatcccagctacttgggaggctgagcaggagaattgcttgaacctaggaggtggaggttgcagtgagccgaattgcgccactgcactttgaagcctattcaaaagaacaaaatttagccccagcgtttgggaggctggcaggggcaggagtgagcctgctggatggtgctgtggcacagagaggcaggtggcttcccaaaatacggttctacatggaaatggagtgcaaagtcttacgtcatgactgcgaggaattattactaagattgttattttactcaaggcccaaaagtgatcaagctgccctagtcggaaacattttagaaaatgttgtattaaagagtcagtttttcacaattcttttgtaacttaatccagttcaacttctgtcctttcactctgtggcaacccctgtccccactccaggacaacaactacctcccagggttgtgaagagtgttaaatcacttaaaataagatctgatgtgtaaagagccctctttacagaggtaaaatgcaagacattttatttacaggagggagctagatggaacaatcttcaaagtctttcaagatttaatactctaaaagagtgtgagatatttactgaggacttgctgtatggatggcatgtgcttgtctggcagaccacatctggttggcaggtgaagggtgaaagttcaaatgctatctctggggacaagggatctgggaacaatcccagcacttggatgcacagctgctccctctggttcgctttctcccgtctttgcatctattcattgccttttcttctgttggactctattaacaaggattcagcttcctgccattcccctagaaaccaactttaaaggaaaaaaaaaacagctttaatcttgtttttggcaatcacgcttgaaacagagaaatgaaaaataattaaaatcctaatttaaactgcagtaaagggaatatgaagagaataaatgtgctatgtaaatttctttctttcttgtcttttttttttttttttttttttttgaggtggagtttcactttgttgcccaggctggagtgcagtggcgtgatctcggctcactgcaaacttcacctcccaggttcaagtgattctcctgcttcagccttccaagtagctgggattacaggcatgcaccactatgcctggctaatttttgtatttttagtagagacaaggtttcaccatgttggccaggctggtctcgaactcctgacctcaggagatccacccacctcggcctcccaaagtgctgggattacaggtgtaagccaccacacccagtgtaaatttctaattgatatatgatgtcttttttttgcaagattgataattatataatacatagttatacatagtttatttaaattaagttattctacttgaagtattcacattttggggttttgtcccaataatatgatgccaattcattaatataataaaaccaaatatctatgttgtttttccctaacatgcataatcatcaatttgcttttgaaattttccttcattgttatcgactacgtgccaggcatatcaggctttttcttttcttccctccctctttccctccctccttttcttcctcacttccttttttctttctttcaatcaataagtcattttttgttcatttgaaattagaaaatataccatattgataactaaaacttaagacttcaagtattatttttgctttcaatttaagcattttgtttttatgaagacaactgtttaagcccctctattttgctgtttctaatgtattctggattaagaaaccagataacaggttagaatgaatttagaataaagttatagcctccaaatgagagtccaggttgttcatctttgaagaaaacattcacacttttatttaagattcacacttttatttaagaggcaaactctattacatagtttttgctttgggagatcttttttgcttactctttgattttgggctttattccactctgattagtgacttctaaatatgtgagatgttaggtcataggatacagaattcaagtgataaaagaatcccaagaccatctgatccaaggtctgcatccagagtggtaccccatcaagtgaaagggattatccaaaagcacagaactcgtggagtcaaacacatatgtctccaaggggaatatgcagcaaagccaagtctctcactactggcagaccacccttcttagcccttatctctttctggtccacctggattgaactcaaccaaattaaaaagaaaaactcaaatgttagtaagatactctacaatagaatcataagctaaatgatttcattttatgtgtgctgcataaacacattttcaaacactcaattccaagtttttaagaaatatagttcaaattacgagtagtaaaaataattttacaaagtgtggtcttgacatattttggcttatagggtgtagttagggaacttcaaaataaatctgcaatttaaactattgatgaagcatggcatgagacatcagcatgaaactaccagaaactcaagagtttagtcaactttttccattctgcagagttacacaacagggcaggaaccttggattgtttatgattatttctccaacaccagtgagtctgtgtcacaagaaaggtcctcagaaaaagttcatgaaatgataaatggatgtatgggtggatggatggatggatggatggatgggtgaatgtgtggatgggtgatggatggatgatggatgaatggatgatggatgaatggttgggtggatgggtggatggatgggtggataatggatggatagctcttctcagttttgtgaatagtatagaaatagtctttctagatcataattttatgactatatcatatagagatgccgacttaattttgagatacgctacacgttttttccatggatctgtagtcacaggtagaatggtaaaagcaaaagattgtaaagtatcacaatggccagcttgcacatctcttggccattcacaacttacctatctcctggcagatgagggatgttttctggatatatgggaaccagacacactctggtgacatcctttctctttagccttatttatctgtttttttccccctagtgtttcctgtaagacattgaagtttaggaaattgaattatctaaactgttatatgccagtaggtgctcagggcagtggatgttggcttttttacaaaagtcagtcaaaggataactatttcatattaatgtcatgtattatagaaggatgaggtcaatttcagtatctggcagtgaaaaacaataggatcagccatcacctgcaggcaaattaataattttacttggcaattgtgcataaatttcatggctggcaaaacactttcacatcttatatgtttcaatgctcggaagaactcaatgcagtagtcttataaccaacaagtagcttgcccaaaataacacagctggtaagcagcgtaactgggatttaaacccagatttctagatgcaaatcacataatctctccatcatcccaaggggtctctcgtcaggattcattggtaatcgtagggagattttgtagggatgatgggtcctctccacataaactatattcccttatctacaccttcaaagttcctggtagagtcaacacattggattaaggctttttccatggaatacactataataagggggctggagcgaggctgaccttcctctaacacaacgattaacaattttggctggttgattctttgttgaggggctgtctgtgcattgtaggatgttttacaacttacctggcctctacctaccagacgccagtagcatcctccaatcatggaaactaaaacatgtgcccagacattgccagatgatccatggagggcaaaatcaccccttgttgaaagccacttctcaaacccatgaccacagatctgtttcatcaggtcaacatccttcaccataaatttcagggatctggaggagtggagggtggagactataagcttgaggtttaaaatagttaatgagacctcaagttttaaaaacttgtagagagcaaatacagaggattgaacagtttagaaaaacaccacaatgctaagcaaatatcttacagatagaggtgaacagtataaaatggaattcctgtcttaaattttagtattgtttctatctccagtagtatcattactgttgctcctggcatcagaagtgaaggtaatatgagaatcagaggttcaaactgcagtctccaggagtccagaagccagcctgattcaagggttacatacccttccacacttaccttggggctgactagggagccatattctatctgaggcctaggatactcctatgtctttccctttcatattatagcatacttttctagaagggcttttggcaagtggtcagcaataaaatcatggaggaatctcatctttctcttcttcctcctcttcctttattttttcaatagttggacatgtttgttcaaaatctagtttgttttgagaacagtgcaagatcacatggaacataaaaaagaaaacaaaaaattcttactaactagatgagttcatggtaaagtgattatataattcattgttcaaactagagcatttttgagagtgacagggggtgctcttacaatcacgcttttgagacaacaggcatgatttctgggactgtcactggctaagttggacaaagtgttccccctagttctccatgactctttcagctcttattacacactcctgtcaagatgtgacggctctgttctctgggacaatactaataatggggtcataatgttagcaataacaaatgctgtgctaagtttgatacatatgttatatccaatttaaaactcacagaagaggagctttaggatggctcatgagaggcatctggtactcactccctccacaaactaggaccaaaatagcaagtagataatcatattttaaatagatcacataacagagaatgctggaattcaacagagaagtgataggaaacatctaaggcaaggaggaagagagaagtaaggcagagagctcagttttgattggctaggatcctggagaggctccccaatgcagggaaagggtaagtgagtgacccccagcagcctacatttccactgcaaatccctgcaatcctacccatgggaaagctcctcaatccatgccggctctgagattagcatgagcagctaactaaagaccatgcactgtcacaacattgctccagagagggagctcacattgagtactacacaccccctgagtcctaaacagctacagaaaggtgctattttgagagtctagactccaccagagtgcatcctgccctgggtcccaacaacccctgcatctccacatccctggagccccaataacatccactcctcatagccaggtgccactgctggctgctgccactagagcctaagaacgggccattggcggtgatcctgccacccccagaagcagggctgctatgcgtttacaagtgccctgcaaaaaggctatgcagcttcacctagggctgaagagcatgctccccagccacctgtttaaagatgctgccactgaaagcaaccctgccctcctcagcagcagggctgcagtgcagctgctgccatcttaacctgagtatttctccaggggcctggaaatcacctcatctctgcctaacacagccagtgcttatactcagcccagttccatcctccctccccagtgtctgagcatgctgcctggggacctggagagcgccctgcccctggagattgccctgccccatcattggcacctgagcactcctcctggggttctaaggatgggctgacccaacctgctgccaccactacaggtggcactcactcgcacatgccacctgcaagcctggggactggcttgcccagcctgtcccagccactatcaacaccagcacggaccatgtgagagccagatgattgtcccaccactgctactgccactgcccacaccatgcccactgctcaagaacctgaggatctgtccacctacctggcctaccactgccacttctgccacccaaacaagcctcctagaggctcaagaactggttcacttggacctgctaacaccagtgctagtgtatcctgccctgaggctcaaggacaagcatgctcagtccactgctgtcatcaatgcactggtacccaaggactggctcatttgatgttcctgtccccagcaaaacacttcaccataggctttactaacaccacagtctaagccactgaggaaatcaaagatggcacagattctgtttacaactgaagaaatcatatggagagtatactactgcacacaccaagaatcaaagccaaagtgctgtgtgctactcaaccaataccacagatatatctttagcaaaaaaatcctctcctattataacaagttcaaaaaattgaaagaagcaaccactacaccagatgtgcagatatcaatgtaaggacataagaaacatgaaaaaacaagaaaatatggtaactccagaggaagacattaatactccagcaacagattccaatgaaaaagaaatatatgaaatcccaggggaagagttcaaaataatgatattaaagaagctcagtaagctacaggagaacacagaaaaacaatgcaaggaaatgaaaaaaaacaattcagggtatgagtaagaaatttgccaaagagatagatatcataaaaaagaaccaaacagaaattcttgaactgaagaatttactgaatgaaatataaaatacaatcaaaagttcaagaatagactatatcaaacagaaagaattttagaacttgaaaacaggtgttttgaaataacccagtcagacaaaaataaagaaaaagaataagagaataaacaaagcctatgtgacatatgggacaccataaagttatgaaatattaaaatttttggtgtcccagaatgcaatgagacaatgaaagggacagaaaatttatttaatgaaattatagctaaaaaattcaacagaattagacatccagatacagaaagctcagagattcccaaatagatacaattcaaaaaggtcttcatggcacattatcatcaaactgtcaaaaggcaaagacaaagacagaattctaagaccatcaagaaaaatgtataaagttacttataagggaattccccttagactaacagtgtatttgtcagcagaaaccttacgggccaggagagaatgagacgctatattccaagtgctgataacaaccaaactacccaatttgccagctaaggatactattcccagcaaagttatccttcttaaatgaaggagaaataaagtctttcccagacaagcaaaagctgagggaattcatcaccactagactggtcctacaagaaatgcttcagggagccctatatctggaaatgaaaagataatatctaccatcatgaaaacacatgaaagtatagaacccactggtagagcagacacacaagtgggaagaaaaaggactcaaatgttaccactacagaacaccaccaaaccacaatgatgaataataagagataaataaaggaacaaagtatatacaagacaaccagaaatcaattaataaaatgacaggaataagacttcacatatcaataataatattaaatgtaagtggattaactttccacttaaaagatatagactggctgaataaataaaaaacaaacacaagccaactatatgtcacctacaagaaactcatctcacctgtaaaaacacaaatagactgaaagtaatgtgatggaaaaagatattccatgcaaacagaaaccaaaatcaagcagcagtagctatactcatatcagatgaaacagactttacgtcaaaaacgcaaaaagagatgaagaaggttgttatataatgataaagggataaattcagcaagaggatataacaattataaacatatatgtattaacaccagaaaacccacatatataaagcaaatattatgagatctaaaggcagagatagacttcagtacagtaatagttgcagacttcaacaccccagtatcagcattatacagatcatctagacagaaaattagctaagaaacattggatttaaactggctaagaactcaaaagcacaaacaacaaaaccaaagacaaatgggctatattaaactaaaacgtttctgtacagcaaggggaataatcaacagagtgaaaagacattgtgtcaaatcagagaaaatataaactatcatttgataagggactaatatccagaatatacaggaaactcaaaaaactcaacagtaaaaaaccaaataatacaataaaaaaagtgggcaaaggacatgaatagacatttctcaaaagaagacatacaaatgaccaacaggtatatgaaaaaatgctcaacgtcattaatcctcaggaaaatgcatatcaaaatgacaatgagataccatcttactccagttaaaatggctattactaaaagacaaaaaaatcagatgctgataaagatgtggtgaaaagggcactgttggtgagagtgtaaattagtacagccactatggaaaacagaatggagattaccaaaaaactaataatagaactactatatgatccagcaatctcactaaatggttatttatccaaaggaaaagaaatcagtataaaaaagggatgcctgcacccccatgtttatggtggcactatttacagtagccaagatatggaatcaacctgtgtccatcaacagaggaatggataaggcaagtgtggtatatatatatacacacaatggaatattatgtggctataaaaagaatgaaattatgtcatttgcagcaacacaaatggaactgaaggtcactatgaaggtcattatgttaaggtcaaaatgttgtatgttctcactcctatgtgggagctaaaatggttggtctcatggaggtagagagtagaatgatagataccagaggctgcaaagggagtgtgggtgagtaggacgatgaagagaagtaggctaatgggtacaaacatacagttagatagaaggaataagctttaatgtgtggtagcacagtagggtgactatagttaagttaacaacaatatattgtctatttcaaaataacaaagagagaggacctgaactggtcccaacacatagaaatgataaatactttaggtaatggataccttaaataccctgacttgatcattacacattctacgcatgtaataaaatatcacatgtactgcataaataatgtacaaatatgtatcagtgaaacaactgacaatgacaaggttccttttataaccctcactgttccagatgaaaaactgaatcaagatcatatagttattacgagatagggcagggatttaaatcagaccatttaatccaagaaccacccatttcaccatgattgtcatgtgtgtcagttccatgtaatgttcttactgacctgcaagatgatgtgtacgtgcttcaggatctactgactagcaggctttgaaatccctgcctcctagtacaacctattctgcagtgacactcttcttttaactgaaatgtaccttaccaagtaactgaagaaagccagccagattaagaagcgggtttggggccacttgtaggtaagtgagtgcaactgtttgaggagaattccaggcaaggagaaactttactcagctctaagtgtatcctgtgatctaaatgttacagatacattataatcccacgggctcttctgaaaggagcagatacctgctagagaaagagcagatttctatggagatgaggccattccttctggaaaagcaacaaaagcaacaaacccttacattgtttataagcccttaaggttttcttgtaatccgagtttacctgcttcatgattccttataatatatggcagaaggactgtataattattaaaagttacttaaatatcaacgctttcatttcttgtcatccacctctgaatctgtcacctctgtttaaccctccctggtatttaaatagctaatctagtgttggaggccaggttaacaacgtgcacgtctctaagtgacttcatagcgaccttcacacgtctatttatttggtatttcctttgtgttcctttatatgaactgactgagcccttgctaataattaaaagaatttgctaaagtattcttttggcaaagtcagtagataagaatttctgtaagtggctcatgcctgtaatcccagcactttgggaggccgaggcgggtggatcacgaggtcaggagatcgagaccatcctggctaacacggtgaaaccctgtctctactaaaaatacaaaaaattagccgggcgtggtggagggcacctgtagtcccagctactcgggaggctgaggcaggagaatggcatgaacccaggagacggagcttgcagtgagccgagatagcaccactgccgtctggcctgggcaaaagagtgagactccgtctcaaaaaaaaaaaaaagaatttctgtgaatagtgtgtcttgtgacattagcttgcccaccaaagtataaaactaactgagaaaagtattttccaaaactagttcaggttggtgcatatgtatttgaaggcacgtgtgtattcactcattcaggaaatatttatggagctctactatgtgcctggtctatcctaggcaatgacaagcaaaaacccctgctttcacagaatcaccatcctagtggggtgaggtagggcagacagataacaactagaatatattatgtgtcagatgaagataactgctatgggggaaaataaggcagagaaggatgccagagagtaggggttgtgttttaaaatggaatgcttggggcgggcatggtggctcatgcctgtaatccaagtactttgggaggccaaagcaggcggatcacgaggtcaagagatcgagtccatcctggccaacatggtgaaaccccatcactactaaaaaaaatacaaaaattagctggatgtggtgccatgcgcctgtagtcccagatactcgggaggctgaggcaggaggatcacttgaacctgggagctggaggcttcagtgagccgagatcacaccactgcactctagccattttataaaagtaaaatggagtgcttggggaaaataattaatcagagactgcagcaaggtaagggagtaagccatgagaatatagggggcatcccaggcagaggcccagcaagttctagggacggcaagcaggctggtgttttaggggctgcagaagtctagtaagccagaaagagactgggattgcctgattttataggaccttatacttcatgcataaagacttgactttttcttactgtgagacagaaaacctttgaaagattttgagcataaaagtggcatggtctgattcatgatttccaaagaggatcagctggctgtggagtggagagcagactgtcgaaggccaggaactagttaggaggtggtggcaataatctaggtgacaggaggtgatggtgacttggactggtacagtggtaatggagatagagagaagaggttggattttacgtgtgtgagtgtgtgtgtgtgtgtgtgtgtgtttgtgtactttctagtgatggcatctcactatgctgcttccaagctggtctagaactcctgggcgcaagtgattctcctgcttcagcctcccgagtagctgggactacaggtgcaccaccatgcctggctttgggtatatatttttaaaaagtgaagccagttggatttactggcaggttggatgtagggtttggaagaaaagagctaaggttttcagtttgggcatgtctgtgcacacgttggcatatgtgtctacataaagcttaatgttatccaaaattatctcatttctttttttacttattttatttttattttttttttgctttataccatttgaagagggaccttcccagtcttgtttattgctgtatatccagtgtctggaacaatctgtctctttctctttctctcttaaaagaaagtatttagctatcggtaatgtggttacagaaaaattgtaaggagctgttattttctgtcttctgcattttcagcattgagcctgcatttatttaaaaacaaactttatttaatttcagaagattgaacaaatttgcaaaattatataatagaaaattttaaaatgcttattatcattaagtgaaaaattctacattctgcagacagaatgttattttgagagccaatgttaatgtgagtaaatgaccccaaaccctataaaagaataaatccaaaccctataagatcaaatagccttgtgtgatccacaggatcagtttccaggacagaatagactttattagcattgtttttctgcaaggacattattcaggccagttctcagccactcagccaacagctttgtttccgactgtgccaagtctgcaaacagtagctgatcatctttagctcaattcaaaaggaggtttttctagatattccaaccacacccccccccaatagccagcacatttctatcaagtttgattgagttagagtttatgaaatatttcctgaatgactgaatacacacgtgccttcaaatacatatgcaccaacctgaactagttttggaaaatactttcctcagttagttttatactttggggggtaagctaatgtcacaagacactctattgacagaaattcttatctactgactttgctaaaagaatttgctaaatattattactcgcatgagtgtctttaatttggttctttgtaaacattgagcattgaagacggtttgttattaaggacaaagttatgtatctaactaatctcacatttttctaagcagcgcaaataaacccagagcccttcaatggttcacaggtccacaatccttttatacacattctgaaatcctaaaaggctctgaatactgaaagctgttttgggaactcatctagaatcagaaccagaaaggcttgaactcagctggaggtgaacctaaactgggggtggggggcctgaagcttgtatgattttaccatatctcaccaaatgtgatgcctgtcttactgcagaaatattaatgtgtttgatcacaaagtgatgttctgtgttatgtaatatacagtaaaatcactcaatcatctttctaacaattctgttttctgaaacacatccgggctcatgggatttgcataaagcactgtaaacctgtactgtgtttgctgttccgggctgaacgtgctggcttcatctttctttacaagataagggtgatggctgctaccttgccccggtgaatgcagcaggattccttttctaggtgcctagagcttttacggctcacgtgcatctctggctcacctgtgtgagtgtcatgctttgactagatgccactttgtggtgatgaagcttctggcctgtacctacccagacagagcacagccttggagaaaggtagcatgaagctgagtgtctctgggctcctgtcctgtcatccatcagtgatgagcaatgggaagtagaaggagacacattatgttcatggccaaaggtgtgaccccaagccacatcaaaggcacacccagctctttcaacgaaaacaaccttctgtgggcatgaggggctcatgtatcttaggccaatatcaaagccatataaagcctgatgaatcaagtcagtcttgagctgggatccccgttccaccacatttacatagtgccaccttgggtaacccagtttcttggtaacccactagaagtagcctggcttataataaacttacgacatacttttcaccataataacttcctttttaaagtaggtattgggtctgtgatcctgggagaaccctaacccagggaattccatagctcccctctttcacatcttggattttcttttctccacctccagattcccaagctcttaacttggaggcagaagcactggtggtgagtttagaaatctaggagaatcagcaagatacacagactcttacagtcttaagagacccgggagatgaaggtgtaacctttttccagcgcagggctcccacgatcctccagacaggcccggagaagcggaccctcatggacaacagcgcccatctctggtcagagaaactcgactggctccttgtgcgtctatatgaggggcctctggaacctctccgggggccctgcagacatgggaaggcggccagcgtagcctccccagcttcttctctcagggatttacacccttgctcttggacatcaggcacaatgtggacatcttcagttgggtaccgggggagcttgatgcttcactcctggggtaaggtggggattaggtgtttgggtgtcggggtgtgtgtttggagggggtgatttaagtgactctggaacttgaagccattctagagaacaacacccaagcggccaggagaaccagaatcttttcatcaacatccacaagggtcacgagaaaggctgtcattggccaagctcctaggctacccaaacaaaggagggaggaggggaagacaaaccccgcccaagccccaggggatggagttggcaccaaggacttctggtcaaccccaggacagcggacagcgggccgggcacttccaaaggcgcaggagcgaagcagccctctccagccgtgcactgcacctccgcggcccgcgggcgagattggggtcccggtgggaagcagacgcgcaatcggggagaagctccagcagtggaggaagagtccagggagtttcagctgggcagaaggggcgcagaggcttggggccaagcggagtttgccctgcgggtcctgcgcaaggccccagtgccccggctaaacctttgccgcaggatcccggagccggcgtccttcaaggagcacagagggccccgtagcacgccccttgcccagcgccaccgacccttaagcagcgtcaaggaaggagtcccgatcaaggacagggatctgcggccatggccgaggccgcggagccggagggggttgccccgggtccccaggggccgccggaggtccccgcgcctctggctgagagacccggagagccaggagccgcgggcggggaggcagaagggccggaggggagcgagggcgcagaggaggcgccgaggggcgccgccgctgtgaaggaggcaggaggcggcgggccagacaggggcccggaggccgaggcgcggggcacgaggggggcgcacggcgagactgaggccgaggagggagccccggagggtgccgaggtgccccaaggaggggaggagacaagcggcgcgcagcaggtggagggggcgagcccgggacgcggcgcgcagggcgagccccgcggggaggctcagagggagcccgaggactctgcggcccccgagaggcaggaggaggcggagcagaggcctgaggtcccggaaggtagcgcgtccggggaggcgggggacagcgtagacgcggagggcccgctgggggacaacatagaagcggagggcccggcgggcgacagcgtagaggcggagggccgggtgggggacagcgtagacgcggaaggtccggcgggggacagcgtagacgcggagggcccgctgggggacaacatacaagccgagggcccggcgggggacagcgtagacgcggagggccgggtgggggacagcgtagacgcggaaggtccggcgggggacagcgtagacgcggagggccgggtgggggacagcgtagaggcgggggacccggcgggggacggcgtagaagcgggggtcccggcgggggacagcgtagaagccgaaggcccggcgggggacagcatggacgccgagggtccggcaggaagggcgcgccgggtctcgggtgagccgcagcaatcgggggacggcagcctctcgccccaggccgaggcaattgaggtcgcagccggggagagtgcggggcgcagccccggtgagctcgcctgggacgcagcggaggaggcggaggtcccgggggtaaaggggtccgaagaagcggcccccggggacgcaagggcagacgctggcgaggacagggtaggggatgggccacagcaggagccgggggaggacgaagagagacgagagcggagcccggaggggccaagggaggaggaagcagcggggggcgaagaggaatcccccgacagcagcccacatggggaggcctccaggggcgccgcggagcctgaggcccagctcagcaaccacctggccgaggagggccccgccgagggtagcggcgaggccgcgcgcgtgaacggccgccgggaggacggagaggcgtccgagccccgggccctggggcaggagcacgacatcaccctcttcgtcaaggtaaagctcgcttccctcaattcttaggacgacccccttccattcgaggtcttggtcatctcagatcccagagggacgcgcagggaggaacccttggtggtatcctgattgtcatcaggcgcttccatgcgcgggcggtaggcgggacagccgggatttcccggagaagagtttccagggcatttgcgggaggactcaatggtttggaagcaaagactttgggggtgggggcgacggggagtgcgatgggggccaatgaggatgtggggttgtgggttcagcatcccactgtcctttgacctgaacatcctaaccagccctcctagtcaggaggttattaacgaattaactaaaaagttaaaaaaaaaaaaaaaaaaaaagaagaagaagaagaaaagcaacgcaccctattggtgttcaaagggatttctgccaaaggaagctttaatacttgaagccaaaaaacgcagacaggtaggttcaatgtgggaggtgccttccagactcaatctcggagacccagagctggtcaatgttttcaactccaaaaaggtattccattttggtagaatcaacaatgtacgtttaggggggaatggagccttattgacataatgttttttgaacgttttaacattgaatttggaagaatacaagatgccggtgacttgaacatcatctgcttgtatgtcatgtttttaacctcagttcacatgggaagagagcaaggattctgtgaaggaatctgtagagacacaactgaggaagttttgaatttaaacaggaattatttacaaggcatgaaaaatgaaagaacaaagctcagcagcagttcacaccaggatctttgtttaaaaagccttttctgaggacctttggccagacccaggaaagttggagataataaggtcaagaatgtgcatttcatgttgaatcataatccttcagaaatacttccaggcttatagaaaccagttaccatctaaatctctctggctgaaatgcaagcacattttaataagtaaaaggaaatgctcccaatgtgattaacatcagaattttaagaattgtttgggtggcgaggggcttgggaaagaaggggtgtgtgtgtgtttcttccctagtgagaaggtgctgtttctggcttttttcaagaccctgggacataacctcaggacaccagcccctgagaggctgctgggaagagctggagcgcagtgctgctgtgtgaccccaaatctgctcctctccatcaccttggttttagaaatttcccgttgctgtggttgtaaggatacatgattctggcacacggcctcttagcacagttttgatggacagtagcagcttctggctagtctccctgtttcagttctctgtcctctccaatctagtctctttgtaatagccagtgagctgcggacaagatctgatcattttatttctttgtgtaaaattcttcagttgtttattgcagaatttcaggtaaatccccactccttaggcagcccacaaggccctttgtgatgttatttctgccttctttctttctggccttggcattgctgggtgtccccaccctttgttacctgtggtctcgctatgccacctggattaaactacttactgttccttgagggagccacgttctttcctgccttgaaactttctacattatgtaccctctgtctgaatggagtttctcctcctcgcccctgtctgccctcctgcctagttatctgccacaagtccaagagttagcatggatgtcatatcttccagtcccagtcggatgaccctgttaaggcattgccctcagcctgctatgtctctttcctcagctgtgtgaaattcatcattctatctccagcgcagaacacaggtgtgggatgtggtgaaggcttgaatgggcggctagctgctggatagtgtggtgatcaagaacacggactttagagccagtgggtctgggatcaaatcttggctttgctaatttcttgccgtgtgaccttgggcaagttacttaatcttttggtatcattgtggtctcattgataaaatggggacggtaatagtacctagcccttgaggttaccgtgagaaattgagaattagattacacaaagcacttagaaaagtgcctggctggaaataagcttagtacacatgtgagttcctattgttacatctgtgctgctcgcataacttgcactgattttgcacagaaacagttatccctgccattacttattttatttatttttagggaaaatccctctaggtacgtaattacctccaatctctagggataagaatgttgtgaaaagtaaaaacaacttgcttcctcaaatactgcttgggaggagtttgtgtgggcagaagcatgtggcctagcaccagcagcggcccagcacgagcagcttacccacaatgctttattctgatgattgatctggtgctcagttgctaacttttttttttcttaaggaaacagatagatctccaaatgatgagattggttaacttttttattttttttttaattgagacaggttcttgctctgtcacccagacaggagtgcagtggtgctatctcagctcactgcaacctccacagactgggttcaagtgattcttgtgtctcagcctcctgagtcgctgagactacaggcatgcgccaccacgtctggctaattgttttgtgtttttggtagaatggggtttcgccatgttggccagcctggtctcaaactcctgacctcaggtgatccacccaccgtggcctcccaaagtgctgggattacaggcttgagccaccacacctggctgagatttgttaacttctgaggggtcacttatcatgagcctcacagtattgatattgtgtctcagtttcttcttatcctaccaattatgctctttgaaaacaaaatgaaacaaaaacaaaaaagacagacatcaaagcaaaaaacaaaactaaacaaacaaacaaaaaaacaccctttagactcatattttctgagtttgaaatacttgatgtaaaatctggaaattagttcagaataggatttctttgccagaattagccttttctaggctccttttttgggctcagttttgtctgggttctattctacagtggacacctgagctgggttttgtgaacatgcctagatgcgtcttcatggtgggttttgtatggcatagctggagtgtggaattcacagctgggtttaaaggaaagtactgcaatattctctcaaacattctcctagccttcatatgacagctgagcaaacacattttaaaatcagttagcccatattttatttgggaactcctagctttcacatttcttccaattttttttttgagacagggtctcactatgttgcccaggctgatctccagctcctaggctcaagcagtctccctgtgtcagcctgctgagtagctgggaccacaggcacacaccattacacccagctagttttttcaaaaaaatttttgtagagacagaggtctcacttttttgctccagagggtctcgaactcctgggctcaagtgaccctcccactctggcgtttcaaagtgctgggattataggcacaagccaccatgcctggcctctcttcctattttgttaaaaataaatatattggttacaaatataccagaaagtcatggctaactatgtagtaacatgtaataataattgtcccacatttgcttctaattagccatctaatatattctccatctttatgagaattgtcatgttattaatttgtcagtttgttttattttacaagcatgcaaggatgcattcttgtacagaagccaggaacatatagaaccagccaagaaaggtcttaaattattttgtggtaaattaattgctgattatgctaatttttagttttgttttctcaaagaagtgttaattatttgtcatcaaattatagggtaactctgcaatatatttagtaagaaaggttctttttctttcctcataataacaaagggtaacaacataatcacataatcacacaacaacataataacaacaggcaaaacactagcagcagagagttaagtaagaacttcatttaagtaaggagttcagcggtagtggagatttagtcgccaaggaagtcttgcttacggctttggttcccctaatctggcgtgtaagctttgagtcagggtctttgggtgggacagtctgagctacggctttcctggcaaatttgacatgacttaaaaaacttcagtgttgaccagtgattagtcctgggccacccaggatttagacaccacctgtttacttgtaaacatgcagttattgctgagctaaaaaaacttgcatttgtattcacatttgggttctccaaagaggtgaaactgacccgatgaaacacagtaaaactcaagaaggacatggcctttgaataagcactgtcacccagaaatgagcccccgcccctccaaaaaaaaaaaaaaaaaagagccttccaagcattgccataccacagggctgggcaagaatgagccaggaccagcgtctgatggactcctggtagaacggtaagctgtggctctctgtggacatgtcactgggagagagcatgttgggacttgttctatggggcttggtctccagggagcttgaaagggagatgttattttcacaactatgtgttctgaaggaaagtgagcaaagatgcatttctgagactttaattctcccctaaaaacaaattttttgtaatttttttttattgtcttagaaaacctgcctacaaattacacatatgaaatcagtaccgggttacttgggggtggaaacaggtggagcatgatgttttgcgtaacctcttgcatacaaacaggtgcaggtgtgcacatgcatgctgggggtggggatacccctgccacactcagtgagagccctatcgtcattgcctctcggttctcaccacctgccactgcagtgggctcatggcaggccctccactgtgctttttggtgcagataaatagtgggtcgggtggatggctaattggtaagacacaagcccagttctccactgtcccagcccagtgtcccttgtgagagaaacagagccacctttttccatgaaggcctcttggcagcagggttacaggatgctggtggctttgggaatttgaagctctttcctgccatgtgcacacatcacagctcccgtctctgtctgggctgacaggccatgtggcttcatgagagcaattatgtttctttaccttcagcacgggttcctcccctcacatggggtttcctttgtgtccttggtttcacacagccagcctttgtcgggccgactcagatatcccatttccttgaatatctaaagacccacagaaaaccttcagaaatactacactgggtcctttagtcatgtgaatgtattgtgtcctttcggacacctagataaaacctagaagtggaaggagtatgtaaaagccaacactccaatccatgcttgagggctcagagggatcctcatgctatgggtccatatattaattcaatacatatggatatattacctactgtgtgttggactctgtgctagattctggggacacattggtaagcaggactgacaagcttcttgccctcccagagtttaccatctagcacagaagacagacattgggcaatgtagtacattatgtctgtagcatctccactgggctgcaagcctgcactgcaaagaccatgtagtttttcccatcattgttctttcagccctttgcatgctgtttgacacataacagccagccagttaatgatggtatgaagggaagggggatggacgatgagcagcaggccataggagcatgcagcagcagcaggaggacctgcagacacagtggtaatcactaaatagttgttgatttaattacatttggggagacacaaccattttcctttccagtccacagagtagtgggatcctctgataatgcctagtatagattcttcaggattttctaaaacaggtgatctttggtctatcattctctgaactcctgtcatattagtaaagaaaaagtttttgtgagagttataaaggtattcaaatcttctaaaattttccagcattaattttgtttttttttttctgcctgagtgttgatttataaagtgggccctatatctgggcatagttgggggagacattttcttcacaatatagagagtttccaaaagaccacccccatgctttttgtcagcccttttctcctccccacagggagacggtatccaagtccatcttcggctaaaatccgtgcttgtattgacagccccacttcctccttctgaaagcagcattttaatttggagctgttggtgcttaggtataaaatctatttcatttaatgctgctatgaaaatttcccagttttgaatttaagacagtctcttattgttttttcctgctcttgcatgggggaccatctgctctgccaagctttcaaaactttgctctcaagttaggtggcaaatgggctaacaatttggtatatgttaagagcttgttataaagaatacttttgccccagctggtactacagtatggtatttaatgttgaagagaacaccattaagagtgtgttcagctgcaattaataaactatccagtagcaagtgcctttaatcagaaatatatttttctcatacaacaagaaatccagagataggtggataaagcatcttacccatgtcatcaagggctcagattagttccttgtgttctgtctccctgtatcatcaaaaaatggatgccttagtcttaagcaccaaatcctgaccagcaatatctcaagtaggaaactaaagggaagggtcaggatttttcttcttattcccattcctccttcatcagggaggagaaatgctcctgacaactcttgcagcagacttttctgtgtctaatggctagaactggattctgtgccccaaccccctccaggccttttacaagcacaagggtatgagactggcgtatatataccaggggttagcaaactgtggcatgcaggtcctatctagcctgccacctgtttttgtacacctacaacctaagaatgacttatgtttttaaatggttggaaaacattaaaagaagaataattcatgactcatgaaaaatatatgaaattcaaatttcagggcccataaacaaacttttttttggaacccagccatgcttgttctttgatgtatcctgtatgactcctttcactttcaacagcagagttgagtagatgcaacagagactctgtggaccacaaagcccacaatatttattactgggccctttaagaaaaagtttctggctgggtgaggtggctcacgcctgtaatcccagcactttgggaggctgaggcgggcagatcacgaggtcaggagattgagaccatcctggccaacacggtgcaaccccgtctctactaaaaatacaaaaaaaaaaaaaaaagtcacccgggcgtggtggcgtgtgcctgtagtcccagctactcaggaggctgaggcaggagaatggcgtgaacccaggaggtggagcttgcagtgagccgagattgcactccagcctgggcaagagagagactccatctaaaaaaaaaaaaagaaaaagtttaccgattcctagcttatacctacttttattcatcatctggggctagatacaatgccattcatacaaaattggagttcgatttagaaggaaaaaggataactgttgtagaagaaagaactggcaggttctttcacagtgaataagaaatatttaagacactaaacatctatatattgttagaaatggttgttttttgcctacaaaaaccataaaaattttgatttatataaagtcaacataaaatgtaggttaaatgtatttatacaaattttagtataacatatttatgtagtccatgggattattttgtaaaatttacttaccatttttttggaaaagataatacattggaatagtaaaatttagaaacataaaaagatataatataatgagaattaagtcttctttcgcccatgaagcccaacctcccaatttttctccctagagataaccaccaaatatttttccagagatattctatgcaagttcaaacatatcctcaatgtattatctatttctgtgtaacaaattgtcccaagacctagaatcttaaagcaacaaacattttatattattcatagttttccagggtcaggaatttgtgagttgcttagatgggatttttgagttgcttaatctgttctcacgctgttgtgaagaactgcccaagactggataatttataaaggaaagaggtttaattgactcacagttctgcatggcctgggaggcctcaggaaactcacaatcacggcagaaggggaagcaaacacatccttctttgcatggcaacaggaaggaaaagtgccaagtgaaaggggaagctccttataagccatcagatctggtgagaactcactcactatcacgagaacagcatgggggaaacttctctcatggttcaattatctctacctggtctcacacttgacacttgggtattattacaattcgaggtgagatttgggtggagacatagccaaaccgtatcattccacccaggcccctcccaaatctcatgtcctcacattttaaaacacaatcatgcccctccaacagtctccccaaagtcttaactcattccagcattaacctaaaagtccaagtccaaagtctcatttgagataaggcaagtctcctccacctatgagcctgtaaagtcaaaagcaagttagttacttcccagatacgatgggggtacaggcattgggtaaatacacccactccaagtgggagaagttggccaaaacagaggggctacaggtcccatgtaagtctgaaattccacagggcagtcattaaaccttcaagttccaaaatgatctcctttgatcccatgtctcaatccaagtcacactgatgcatgaggtgggcccccatgtggccttggacagctccacccctgtggctttgcagggtacagcatccctcttggctgctttcacggactggtgttgagtgtctgtggcttttccaggtgcacagtgcaagctattggtggatccaccattctgggggctggaggatggttgacctattctcacagccctactaggcagtgccccagtggggactctgtgtgggggctctgaccctacatttcccttctgtactgccctagcagaggttctccatgagggctctgcccctgcagcaaacttcttcctggacatcttggcatttccatatatcctctgaaatctaggcagaagttcctaaacctcaattattgacttctgtgcaccagcaggcccaacaccacttggaagctaccaaggcttggggcttgcaccctctgaagcaatggcctgagttgtacctcggccccttttagccatggctggagcagctgggatgcagggcactaagtccctaggctgcacacagcagggggtcctgtggcccatgaaaccatttttccctagaagacttccaggcctgtgatgggaggggttgccacaaaggtcactgacatgccctggagatattttccccattgtcttggtcattaacattcagctccttgttacttatgcaaatctctgcagcaggcttgaatttttcctcagaaaattggtttttctttttctatcacatcatcaggctgcaaattttcctaacttttatgctctgtttcctcttgaatgctttgccacttagaaatttcttccaccagataccctaaattatctctctcacattcaaagttccacagatctctaggacaggggcaaaatgctgccagtctctttgctaaagcaaaacaagagtcacctttatttcaactcccaataagttccccatccccatttgagaccaactcagtctggacttcattgtctatatcactaccagcattttggtcaaatccattcaacatgtctgtaggaagttttgaactttcccacagcttcctgtcttctgaaccctccaaatctctaggaagttccaaactttcccacattttgctgtcttcttctgagccctccaaactgttccaacctctgtctgttttccagttccaaagtagctttcacattttcaggtatccttatagcagcatcccactctcttcagtaccaatttactgtgttagtccattctcatactgcaataaagaactgcctgagactgggttatttataaaggaaagaagtttaattgactgacagttccgcatggctggggaggcctcaggaaacttgcaatcgtggcagaaggggaagaaatcatgccctttttcacatgatggtgggaaggagaagtgctgagtgaaggcggaagccatttataaagccatcagatctcataagaactcactcactatcacaagaacagcatgggggaaactgcctccatgattcaattatctctatttgatcctgccctttacacatggtgattattataattcaaggtgagatttaggtgggaacacagagccaaaccttatcagttgggtagttctggctcatgtggttgcagtgaggatgtcagtcagagctgtgatctcatctgaaggattaattggggctagggctgtggtttcatcagaaggattgattggggctagggccatggtctcatctgaaggacttattagggctggataatccacttccaagatggctggctcacatgtcgtttggcaggaggtgcagttagttttttttaccacttgggcctcttcataggacttctttagtgtccccacaacatggcatctggctttttccagagcaatgatctaagagagaccaaggaagaagccataatgccttttatgactttgtctcagaagttacatgctgtaacttctgccttattttattcattagaaatatgatcactaagtccagtcctcaaggaaagtggaattaggctccaccaattaaaagaaaaggcaaagaatttgtggacaaatctttaaaataccacatctacttttttttccacaaaaaatagtacactggaaatacattggtttacatcttgctttcttcccttaacaatatgtcttggaaatcactccttatcagtgcctctagctctgtcacattcttgtgaaaaatgtcatagtattctggtgatgtgtatactctataatcattttcttgtaggtagttgtttaggtagcttcctctttttgatatgttaaataatggtgtagtgaatatccctccacagatgcataataatatatgggagctaaattcttagaaatggcattgctacgggaaagggtgtgcatatttaagattttgataaccattaccaaatttcctcttcaaagaggtgataccatgtaatgctcctctgacactatatcagtgccatgcttatttccacaaacttctctgctgaggtattatcaaatattttgaatctgagaggtgaaaataatgtccattgtcatgtaatttgcatttcttttattatgtgtgaggtcgagtatacttttatatatttaaaaagtatataagtattcttttatatattgatatttgtttttctgtgagatggctgcttatattctctgcatttttcttatgggcttttgacctattctttctgattttgatgttaaagaagttagacttttgtctgtcacatgtgttccatatatttttataagagtgtgctgactgtttgcacttgaaaatgtatccttttagtcttagtaatttcttgtaattgatgcatgggaaagcaaagtgtggatgatgatggcactcttagaatctccaacttcattcattgacatctttaaaggttgctttactttatactctataacctcttaaatcctgaagaatcaggtatttccagtcctacccctttccctccattttttttttttttttttttttttttttgagacggagtctcgctgtgtctcccaggttggagtgcggtggcgcgatctcggctcactgcaagctctgcctcccaggttcatgccattctcctgcctcagcctcccaagtagctgggactacaggcgcccgccaacacgcccagctaattttttgtatttttagtagaaacggggtttcaccgtgttagccaagatggtctcgatctcctgacctcgtgatccgcccgtctcggcctcccaaagtgctaggattacaggcgtgagccaccgcgcctggccccctttccctctatttttaattaacaggtacattttatcaagtgtatgcccttttagaatgaaactccatgtggcatggtaagaatcccttttcaaaacaaagtttaaactgtacagacaggaggatcacttcatgcctatatcaccccatcttcagatgtaagatatatcgctttgatctttgcataatatctactgaaatttatttgattcccataaatcaaaaccattgtgaaaatatcacctgtgatgcagtgatataaaaatattgcctctgaggttgtgtctcttggccagatattctatttgtgctccagtctgttgaaagaattgaccaaaatttatagagaatgaggagatccagagaattgtggaggacaatgaagcctacctatagcttatgtttacggagtgggagggtgatatggtttggctctttgtccccacccaaatctcatctcgaattgtaatctccacatgttgagggagggatgtggtgggaagtgattggatgatggaagcagtttcctccatgttgttctcatgatagtgagtgagttcttatgagatctgatggtttaaaagtgtggcactctcccctatccccaccctgctgccatgtaagatgtgccttgcttcctcttcaccttccaccatgattgtaagtttcctgaggcctccccagccatgtggaactgtgagtcaattaaacctcttttctttataaattacccagtctctggtagtttttatagtagtgtgaaagtggactaatacagagggagaactgaaatgctcaaatatcaaaggttgtttgaaaaaataattttgaagcttttgtggaaaacacagactctgttgacatattccagatttttactaggtttgtggattttatccctcaactcactgtttctcttcttttaatagtatatggctgttcacataaaaataagtagggagaagtaaacgctgctttttttttttttgtccttcacactaccaagtgctgttttgcacccaaatgtatattttaaacaaatatttattgattacctgccaagtagcagacattgtgcttggggctgggggtgtaacagtgattagaacaaacacagcccctgcttttctggagaacttcagcctagacagtgatccagaaagaaacaactactatgcaacatgaggaagaggaccacaggagattgctgggccgggtgggaagagcaggctggcaggctgggcagtgacaacagtctaggggaaagttagattctagatctctgaccatgaggcctggccccctgccatgtgcctgtctatttggaagatgaatcaatttatccatctatctgcacaacagatggatgtatgaatgacagccatgtagaaatagctactctgtcaggtggtccatttttaattatacattttgtagaatgtaattttatattactatccataagttcttttcacctaagccagtgatgtctcagcagccagattgtgtttacagaccttgactttgagcacagtaactttacaactattaaagctctatggcacatgaaagattatttccttcttcctctttctacggtaggagactacagtgaggagtgtaagtgaaggccaaaatgagggagaggaaaataaatcactgtaattatagtacacaagcaaggaggacctggaaatgtgacctaggtcattccatgtcccctttctgcagttatttctttaaggagcagcccttatttttacaaaggagaggcaacacagtgctgatgaagtggctgtcagtttcagggcacccttttggtttccaggtgtgagagttcaaaactgtcctggagaagccaggcagttgggtccttttccataaacctagattttgccttccagctagggagactctccactggagagggtacctggctactgagagagaagaaagcctggacccattgttctcaaggctttatgcttttattttcctagctttggtggggtggcagggtggggggtggtgtgtaggatgctgcagtccagtaggaagaagctgatatgcactccagcaatcccccaagcggtgaccctggtcctcctctagccacctggggacatggggatgatgaatcaaagcagagatgaacagaggacactgttttattccctggctggaacacacagtgatattctgatggggtccttagggtgaaggccatatggcctgtccaagacgtcggcacatcacagccatcatctgctttgaaggccgcacaaactaaaggtgttattggtctggagatccagtgatactctttctccctaaataagaaaaatcaacacttttttggtgcctttggtgtgagagccttggaggtgagttcaaagaaccttggaaagacttaactctctcccccagctttgttctctttgttttaactccgggttggatgtcttcaactctcttcccataaatgatcaaactggatgaagttttaggttgcactcggcggcttctctgtgtcatgtaactctccaaacagagaatccagtgcttaaagaaacacagagctattaacacatcagacatggagggggacatttttttgttagctgccctttttactaatatattataatgctttgaatcataaataacagcaataaagcaagaatgttctgtcactctccaggtattgaggctctggctaagggaagtcctgcacatatgtagctccacccatggctgagtacaaaacaacaactccattgcttttagacactactaaggttttcttaacccatttatgcctagtattccattattggaccgctaagcttgtggaagttatttatatcctactgctcaatgtcatcaccaaggtctgctttttcacacaaaaaatttgcaacctcaggcataaatgggttaagccagttcaacttagtaaataactaaaatgctcaaagcatttattaatatgattaagaacatatgctttggccgggcacggtggctcacacctgtaatcccagcactttgggaggctgaggtgggcagatcacgaggtcaggagttcaagaccagcctggctaacatggtgaaaccctgtctctactaaaaatacaaagttagcagggcatggtggcactcgcctgtagtctcagctacttgggtggctgaggcagaagaatcacttgaactcaagaggcagaggttgctgtgagctgagatcacgccactgcgctccagcctgggtgacagagtgagactctgtgtcaaacaaaacaaaacaaaaacccaaaaccaaaaacatatgctttgagcattttggcacagcctggaatcatatagtgtggtggattaaagatggctgccatttctttaatactcctattaagaagtgaggtttgattctcctccctctgaatctggcctgaccttagtgactacttcgtaaccagcagaatatagtggacgtgatgctgggtgatttttgtcctgcaagactgtgtggcttctgccttattcactgaccatcctgaggtcaccatgctggaggggctacctgtgggtgctccatttgacaatcctagctgagcccagccttccagccatctatgcaagatgatgggcatgtgtgtgaagctgtcttggccccctcagaccagcccatccgcaagacactgggcacatgtgtgaagctgtcttggccccctcagaccagaccatccacaagacactgggcatgtgtatgaaactgtcttggcccctcagagcagcccatctgccagctgaacactgctgagtaaccttcgtcagtgccacacggaacagaaggatcgcccaggcaaacctcgctcaaatccttcactcacaaaatcatgagatactataaaccaggtactctaggctgataaattgtgggtaatttgttacgtggcaattggtgactgggatatgccatgactgatgtctcctctaagctagtgaaatctgagtgggtgaaaagacagggccagatgggaggtgtggagtaacagttgaaagcaattctaaaggggagggggcaatcagaggaaaggaaggaggctccatgcagccagttcttccatttggtgcctgcattttttcccttttgagtcactgtagggattggactactctgtcattcaagaacctaaaccaccgggatatataaaaacaggctgcaatattaagcaggctttctagaacaagatgttcctttgttgcaataattccttgtgagaatttcacaaggaaataagcttttcatctccatgtaaaagcttcagttggtatcaggccatattattaaatatggattaaaaatagccccggagtttttaaagcataattcatatataagaatagatggcaaataccagtttgtttgctcaaggacttcttatgccttgattccacctgctgttacaatgaacactaacataattaagccttttgctagaattgaaagctaggagcaatgtggttcagtaattaatcaatgtgagtcgagggtagtcacccacttaatccattgaataataaattaattgttacaacagctgaaaagaaaaaatactatacatacttaggaatatgtttaggattagtagttttttttaaatgtttacacctatgtttgaaagtgttaagatctaaaatatatttcttagcatctaaatgtaggagtgaataaagttaatttctaagttttaatgaagagtgagaagtctgttttaagggaaagcctagctccttttatggcctggaatgaggaatctggcaataaattttactgataattacagacaacgagcattgggatggagctgtccgctccactgggggtatgcagtgtaaagtattggttgagcatgcaaacaaagtcagtctagaaagtgtggacttttatttatttacaaaaaaaaatttcttttctaaaataggccttgctgcaatgatgatacatgtttcctttatagacttacaagaagtgtgatgcctactatttgtgtcatagtttgagctggtataataacaatggacaatactagcaaagatgtgaaaacgaggggacacaatagtctttcccctcaattctcatcagtgtggccgccccccaccattggtttgactcttattcggctcggagccttatttctgctgctgggttttgctggctgttgctgtcctcgctgtctattttttctccccactagagcgcaggcgagggaagacaaaagacggagaacgacggttcacccgggtggtctcctctgcggctggcgttcccctggccttacagagaggctaagaagcagagacgccttacagatagtctgcatagacgccctgtatggcccatctgctctgcccttgtccctttcattgtacgatggcttgacgcctgctccacctcaggtagctccatcttgcgcctaaccaagaggtgggggataagaccagcgagggtctctagtttgctaatatagactgtagaggaagaagggagaagaaggtgactgagctgagaaaggcttgggcagagggtgcagggagacagctgagcggacctcagtggtgggtctcatgactgggatgcaatgagactgattttcctccttctctaagggagacttgacttgtttctaaggggaaacagaaattccagaatttgagctgaagtagcaaattctgatggccgcaatgtcaaaatttcccccaaagaagcctgcttgtattctatgactccttcgaaggtgtccaagtcccttctagaaattgtgaaataggtttggcgtggtggtgtgagccacttgtccagccaggatcttcctttctaatctctcagggcacctttgtgaagctgctctcagtgtggggtgagggaatgaggtgggccagctctctcgcagttcaaagagagagcaaagggctccttctttattcttcccttgcctgaggaggaccctgcccacacctgcatctttgaagccaacagccctcttgtttcttcctcatgaactgcagttccagatgcagggagagggtggagcagagaaggagatggatttctgggcaatgcacctcccctttggttttccacacctccagcagtcgtggtgagacccactcttaggaagacgttgtcagtgctcagcacaaccccacaggtgcgtgttgacattggagaagcccaggtgaactggtgttcgaaggtacttggatgaagaatgatgtttttcctttggggattgggaggtgcgtgcagaacaacaccagagatggcttccacggtctgtgtttcaaaccacgtgccttgtatctcactaccattcggagtattattgtttattattatgtcttgctcattctcattgcaagtccactttcttatatagaaggtgctctaacaagtgtctcgtttggtgagttaagggatctgaagctttttttttttttcctgagaatcttctggggctggatggacttggtgtccactgatactgcttgacacagctccaggggcactaaactccccagtgcaggctggaatacaaatgcgccctgagacgctgtgcaatgtcaggctggggccttctctggggactgcggctgctgaagatttttcttttcaatccactttcttaggtttggcagaagctttcggacaactccatgtctttgttggctctctgatgtttccttgaacgctttatcatttttgattcaccccaacacagcgtgaaattatgcttcttgctccacactgtcttatccaaacagattcttctcttttccttttaggagccattctgactctagctctctagtcttgaggctagacaagtttcttctcctttattcttggaaaagactttcattattttctgagtctgtttcccatagttggatcacaggaacttgtttggagcttccggcaggaatgtccagacccttgtatattccctgacaaaggacagacctcttgatgggtgagggtggggtgagtggggatctttctctggtccggctcacagctcagagagggtgagggcacagcgctgcctggatatccagcggtgcaggatcagcctcgaggccagtgctgtcaccccacagcacagccaagttatcatcacatgacattttcttctcgaaatagacaagcacatatctttccctatttaattgcctgctggtaccttattgtaaaatatttgcaagttattctctgtagagaatatattttatcgcctccttttcgaattccagttttctaaagcctcactttcctttatcccttaacacaggactgaaatatggcagtttcttaagtcactggacttgcctagattggatttagcgtaacacatgagcttatttggaaaatgccagcctctcctttgtgtggtgtaggtgtgtttgttcatctgcaggtggcagatgaagtgactcattaccctgacactgggttgctgtgttcgccatatgattcgcagccagttagggacattggtttcctggtcactgagcacaactgccccctttgaaaacaggagcctttgaatatctgctcctcaactgctttatggacaattacatgaagctgatttcagcctgggtcagggttagtgaatcctgaaatagtgtgggtgccccctccttttcttttccccagggtgagggtgggaaaggagttataatacatgtcaaaaaaaaaaaaaaaaaaaagcatgtggcacagaaaagaattccttataataaagcccagacttggccagtcaggctggtgtttctccctgtttggagagcagctgatcccctttggtcttgggccacggccttcctctcgtgtgggtcaaaccaggccatatagttgtagtcactcacagtggaaaatgggggaaggtaaagtttccagataattccataatgtctgaggtatcctaaagctctctctctaaattgctaacttctacagggaggtattgtatgtctttgctcactgacatagaactttcaaggttagcaaataaattttccatgaactaggaaccctttaacttgtaaagattcagagactacaaggaaatgcaaaactggaatctaacagttaaaactggagaagtcactcctctgaacatattgatagttctaataaaatgttgtgatttccctaaatgccacactttttttttgattctgaccctgatttcccttctcttgaagcttaaagccaagttttctgatttaatacataatatgatttttatgcactcctggttgattcttttgtctgctttcaccaatgcaaaatgtcaggctggcttaagtgtaaagcttgtgaaacccgaagttttggtttagtaatacaggctttcctttcaatctctgtggccaggaaaaaaaaaaagggagtgtcggggaaaactagcaggttgatacagatgaggtttcttaaacatgaggatatagggcaaggtttaccaaatttgcatttaaatgaaaaataccatcccactctaccattgatctggtgtttggtcctacagcacattgtgcaattgccttgctcctttacaagcaattttgtttgtgctgagagccgttcatttgcgtgctttttttgttgaaattgttccattaaggaaggcaactgcaggagaaactgatgatgtaattgactacaggtggctcttgttctttttgccctttaaaatgaagcaaaacttttcaatgaacgtgtcatccatgagatctattgagaactttaatttagcaatccaaatcttcttagtattttaggttgctatttttttcagtattccaggtgacttaattttaacatttgaatactaggatactttatggtaacaatgaccagctgtagtcactaagacagtttctcaaaactgcctcaaactttttagaaagagatctgacaagcatgtctttacaaaatgtaatttattaagacaagagtgctcatttagctttgccacttcttcagccacctctgagaaggtgtcaccgttgagaaggtatagaaaagttatgaaaacgaacaccttcactttgtgtataaggaaatggacagatagtgtcaactcatggggaggttagaggtcactggagctggtgcccccttttagtttggcctgagggaagatgaccacatatgtagcttgacggactgtggcttttttctagacaatcctctgtgattcagactttcatgaaaggctggtgggggcatttgtagataggtggattctcccagatctcgcaaatcataccacatagatgatcacctgctttctacctgactgcaaagcctctgatttctggagtcttttaaaaggaagtgttctaaaatctatattggctctaaacctgatctcataataattcccttaagaacccttaagatatttctgtttactcactagtttcagtgtaaacaaaaagtactatacaattcccagctcccagctgcagagaagtttcatatattggtcattgaaactgacctgagtatgtttgaaggactggacttttttcattgttaatagattgctctaggcctttggcctctttaaaacttaaaaacattataaggaaagaggaagagaaggcaggtgcctccccggacccccacctccagggagctgtgcatttctaaagaactttgcagaagagctggggaattctgaaccagttgagaaagctgagtctgaacacttttagagataattagaatttctttttcttggtctgctctgccagcatatggggtgaccctactctcccaccactggacttcctccccagccccaccccttgttctttaatgagagtcgagaaataatttaccaatcgtaaattgctgttttcctaacataaggcaaagtatgcaccatctagctgctgacctcaaatcaagatgcatttttaaaagcacactgttcaggtcctaattctgtttgaggtgcctagacaaaaagacattgccttcttccggtgattcttttgtgaagtctaggaggtctgtcaggggttagaaagaccagcttgtcctagtttttccaggactttcctggttttaaaactgaaaatcctgtgtagcagggaatcactgagtcccagggaaatctagatggtttagtcccccactaggggctaaaaactaacttgtagcattttcccacaaaacctaattaggaatggagaccgtaaaagggaaagtgataaatgagtgcatctcttgaccactagggggcaccaatggcctccagaagttgtttccctaccttgacgtttgagggtaggttctaaaaaccatagtaaggaaccaagatttaaaaaggcaaaatgtcatgggtagtcccttcatcctcttgtggtgatgatccaggtctgtgccctgttagatttttggctagagggacctcaaatcactcttgccaagttgaaaaattggcgaaaaataaccatgtgaagccaaatagaaagttccatttggagcttgtccattagaagctgtggccccaaaggtgatgtgaaggaacaagcaggcctgcccacagttcaggtcgaaacagttactatagttcacaagtcgacgtagaggagttgtggtcttgccttgtgacagggtttggatctgtgtccctgcccaaatctgacagcgaattgtgatccccagtgctggaggaggggcctgatggcgggtgattggatcatggagagaactccccccttgctgttctcttcataatgagttcttatgagatctgttgttgttgttgttgttgttgttgttttctttttttttttttttttgacggagtcttgctctgtcgcccaggctggagtgcagtggcacgatctcggctcactgcaagctccgcctcctgggttcacgtcattctcctgcctcagcctcccaagtagctggggactacagcaccaccacgcctggttaatttttttttttttttttgtatttttagtagaggcggggtttcactgtgttagccaggatggtcttcatctcattacctcatgatcctcctgcctcagcctccgaaagtgttgggattataggcgtgagccatcgcgcccggccaagatctggttatttttttgtttctcttttttatttttgagacagggtctcgctctgttgcccaggctgaagtgcggtagtagagcagtgtgatctcagctcactgccgccttgacctcctgggctcaagcaatcctccagtctcagcttcccaagtagctgagaccacaagtgcatgccaccatgcccagctattttttgtttgtatttttttgtagtgacaagttttcaccatgttgcccaggctgaaatctggttgtttaaaactgtgtggcacctcctcctttgctctcttcctccttctccagccatgtaggatgtgcctgcttccccttcaccttctgccatgattgtaagtttcctgaggcctccccagccatgcttcctgtacagcctgcagagccatgagccaattaaacatcttttctttataaattaccccatctcaggtagttctgtgtagcaatgtgagaatggactaatacaccttggttgttagaggtttggtgcagggattctcactttttctccatggcatccatggccatcatgcaagtctttggaaaatgagcagagtggctctatgcaggaagtttctgaaataggctaagtactacctgcttcagggtttcctccctctgcaagttgatgagtagttgacctgctgaactgtgctggggaaaagttgaggattcccatgtggaaattcagctgtattcattttctatcattgccataacaaattacaccacaagcttggtggctttgaataactccaatttattaactcacagttctgttgatcagaaacttgacatgggtctcactgaactaaaatcaaggcactagcagggctgcatttctttctggaggctctaggagataatccaggtcctcacctccccagcttctagaggctgcttgcatgtcttggctcatggccccatcctccgtctttactccagccatatttcatttctccgacccttcttccctaatcaaacctgtcctgaccacagctgggaaaggttctcattttcaagcgctcatgtgatgagattgggtttgcctaataatccaggataatctccccatgtcaaaatccataaccttgatatcatttgcaaagtcatttttgccatgcaaggtaatgcattcacagatgctgtgaactagtacatggacatctttgagaggtcattattcttcctactgcacgagtaaatgccccagagcttgttctctcacattctgtcatggtcattccaggccatggccagagagagtgtggtcaagggttgacctatttggaaagtcagtttgtggttatttgcttggctgtgttggggattgccctattgaccctaaccagtgtcttctcagactctgaaatgagaaaagcaagtctgaaaagtccctttcctacatgaggaagtggccttacttggtgtgctatgctctctgggtgcttttattgaaagctattcatagccaaggcagacattggttttacctgccttaaaaaattccagacccaaattcttttggctaaacgacatgaaatgtgctacttggggccatgatggcctggattaaagcagattcgatgagattttccaaggagatccatggccctgcctgccttgttggaagaaagggtggaattgtttgcccagatgcaggctttgcaggacttcctggtttctgcatgtggatgtctgccccactaggttgtctaagggcatgggaatggaggatgaggcctgttgttaataaggcagaaggacattttgcactctaggtgttggtgtgggggaatgcaacatcaaacccattgtcatctggagttgtagcaagggtttcctacagaggggacagaatatgcacacatgactagagaccccccccatccctggcctacctggccaccaaagttgtccaccagggctgccgaatgttttctctccaatgccccaagcacacagggcatgcatgttttacagcctcaacccagctccattttctgtcctaaccactgtttgtactttgcactttccacctgcttctgatatgtgttctcttatcaccatggattccaaaccttacagagcagagctgggtaaaacaaacaaacaaacaaataaacaagccaactcccatcactctgaggaaggaccctgctggccctggggtcccctccatttgtccagggtgggaatgagagaaggatcctagctgactgcctgggttcaaatcctgctttgtgaccttggacaagtttctctacctctctgtgtcttggttttcttaaatggagacagtagtagtacctacacctgatagggttgttgctaggattaaatctgagttgatacaagtgctcagaaccatgagtagtacagagcacatgctccatatgtgttagttgctatcattatcactttcatcattaccattattattttgcaacataaccattttgctcatcatcacatttgtaaaagacagaactggaatctgcgatcttcttaaggcctcaggtgtattattttgagaaatgcatgtaattatgtatctcctttttagaatgagaattgggggcatgttccaaggtggcatgtatgaatcgatactgatcttttgatctctaaattcctgggacgcggcacccgttcaggtacacagggcactcttttctcaccagctgctgatgggttggggatgcctgcagggtcttctgattggacttggacagagattcttgcttttctctttaatccagggacagtatagaggatcaaagagaaattgcagcctttgttgagagtgatttagagattcagaaatgaggagggcctggtgtctggcccatttgggtggtgccctttggtctggagtgtctgtcacaattctggggtaggtttgccacctgtgctacgccagtgatttttttaactgcatctctagttgagctgagcagcagacttttccaaaggtggccaaagccaggaggggaaaggccgtccctgtattagctggttctccacagacttggggagtttgttaggcttgtcttaaattctcatctcttccctgaacactgacagacctcagccctgtttatctggtcccttcccctcccctccccttcccttctcttctcagcagctgttatttccctatctttggtcccacctcctcagcattcaaagtgttaaccatcaagtctgatggatgcatctatgctggtgttttcattagcgaggagcaaaggcctgcttcttggtgaggaaaacatcaacaatggtatttccccatctaaaaataaggcttttatctgggcagacaatagggtgaccaataatcccagcttgcccaggacttagggggagatggtgggattttcagttttaaaatcaggacagtcctgggcaaaccagggtgagttggtcacgcagtgattgtcattttgggtgggtggagaaaggagcccctgacaggcaagctggggagacatttggggatagttgaggccaggagaactgcggggcctgccaaggctctccttcaggaggagtggttttgctgtctctggctgcctgtgatgaggaatctcataggcctgtgaggacagggttttgctgtctttataggagctcactgtgatgaggaatctcataggcctgtgaggacagggtttcgctgtctctataggagctcactgtgataaggaatctcataggcctgtgaggacagggtttcgctgtctctataggagctcactgtgatgaggaatctcataggcctgtgaggacagggtttcattgtctctgtaggagctgcctgtaatgaggagtctcatagacctgtgaggacagtggtcatgtgctccatgatgtgagttttcatggggtaccttccgtggtcctggccctgtgcttccatggggagtgggaagaaaattcacatgggccacgccacaaggaggcattagcacttgttctgtagggaggctgacactgtcctgctctgaaggaatgtcacctacaggaaacaattagtaaccaattgggtgctaaaggaaggaaggaaggacagaaggaaggaaggaaagagacaaaaggaatgaaggaggaaggaagggagggagggagatagggaagggaaggaaagggatggaaggaagaaaggaaagagaaagacagaagggaggaaggaaggaaagaggaaggaaggaaggaagcaaggaatgaaagagaaagacagacggaagggaggatggaaggaaggagagcagattatccaaggtcctaagtgttgtgtcaggcattgttctaggcgtcgtatgtgtaccatctcatttaattcttatccagcactaagaggtaggtactattatgctttcattgtacatgaagaaagacaagacactagaaggtcaggtgacttgccagtggtcacactgcctgggagcactgtgattccaatttgcattttaataacattccagcagaatgacctaaggaaaatggcatcttatcagggttaaccttgtccaggatacgggttaggaattccagccagagagaccccccaggcccgaggctctgagacccggcaagagtggcttcaaaagcagaaacgctgtgctgggcaagagactgatgatcaggtaaagggtagggaagagtccagtttccatcttgagcaccaggaaaaacagtggggccattgagtggagagaggagagcgagagagagagcgcactttattctttgaagtctatttgcatctttggccaggttatttagcatctctgaagttcagtttccttgtttataaaatgggatgaataataggacatgtcttacacgattttaagaggattaaattcaacaacatccacaaatgatttagaaccttacctgaagtcagagtaggtagtcagtgaatggtagctgtcatgttttgttttgttttgttttgtttttgagacaggatctccctctgacacccaggctggagtgcagtggggaaatctcagctcactgtagcttcgacctcctgggctcaagcaattctcccacctcagcctcacaaggatctgggactacaggcgcatgtcaccatacctggctttttttttttttttttttttaatttttggtagagacaggctttcaccatgttgcccagggtggtcttgaactcttgagctcaagcaatctgcccacctcggccttcccaaagtgctgagattacaggtgtgagccaccacacctgacctattatctgtttttaaagtcaccttagaaattgttgctttttggaggatattctccttaattcctgttctgcaaaggaatgggctagtttgttcctcctgcatcttgttattgaagcagcatcgttcgtaatactagaggttcgttgcctcatgccaaggaaatcaaggacacagatacacgtgaagtgaggttaagaacggaggtttaataggcaaaagaaagagaaaaaagaatagctctccttcctgcagagagacaggggcaccccagtgggtcttctgttcctgtggtgaagtgcatggggttttatagactggcttgaggaggtggtgtttgatttaaatagagcccaaagattggtaggactgggcatgatgtttacatagggcaggaagaagctggctaccaccccaccctaatctttttttaagccggctggagccacgttgcctgttccttcactgtacacgtggttgataaagcaaagggaagatggagccgccatgttgaacatacctggcccccaggtggccttttcctattgtcacatctgccggcattcaccggtgtcagcttccagcttgcttatccgtgtttgcagcttgattttataggctgctttttgttagaaaagaaatgatttggccgaggagggcggatcacgaggtcaggagatagagaccatcctggctaacacggtgaaaccccgtctctactaaaaatacaaaaaattagccgtgcgtggtgccgggctcctgtggtcccagctactccggaggctgaggcaggagaatggcgtgaacccgggaggcggagcttgcagtgagccgagatcgcgccaccgcactccagcctgggcgacagagcgagactccgtctcaaaaaaaaaaaaaaaagaaaagaaaagaataagagaaatgatttggaggctgctttttataaaaagggaaaccttagtgaggacttccttacctcactacctgcctaaataatttctttttaactcctgtatcattataacccttcttcacgtgcttccgcattcccatggtgttgaacttcaagctgtcatggggagtggctgtgttctcctcccattccttggaattccctctcttcgagggggtggtaggaaaagtcagccgcccactgctcaggctttcttaacaccgaccccaacagtcagaagggaccttagccttttcaccgctacagaggactgtggtgtcatttctggaaaaggaagcagttctctggacgcttgccacctccgccacgggtcaaggtgtgctcagccgtccaggtgagcccttctctggacctttcacaagaggtttgtctggctcctagatacgaatgcctggccagggatttttgcctttttgtctcctggctgaagatctgtttgctttgcaatttagaaagggacttaagtttttaattttcacttggagtaggtataggatgtgttactttttaggagaaaaaaaatcagtgaggccgaggcgggtggatcatgaggtcaggagatcgagaccatcctggctaacaaggtgaaaccccgtctctactaaaaatacaaaaaattagccgggcgcggtggcgggcgcctgtagtcccagctactcgggaggctgaggcaggagaatggcgtgaacccgggaagcggagcttgcagtgagccgagattgcgccactgcagtccgcagtccggcctgggcgacagagcgaggctccgtctcaaaaaaaaaaaaaaaaaaaaaaaaaatcagtggttctttaaggactgcacaatttggcataaaaatctcactaattgaggctcgttaaaaggcaccctgcactccgtaattgtctgctctggtgtgttcaggtttggaagagtaatgatgatgatgttgatgatgataatgacaataatagctacctttattgggtgcccagggattccagtgtatcacacacagatcttgcatgatgtaggtgcatgtatccctatttttttaaaaaagggagaaactgaggctcagggagaacaactgaatcgcccgaggccacacaattagtaagtagggggccaaggttccaacagctctccctggctccaacgccagcacccattcccgtccaccatgttgccttggagaaacctgatgttgcctgaaaagggaaatttcaactcctcaggcaaatggataaactcataatttttttttaatttacagaactattcaaaatcaagaagtctcatcaatttaaatattgcattttaagttataaccatcagactgggggctgggcacagaaggcagcctggcggacttgctgcgggtgactcaggccctctcactttctctcccacctcctcttctcctcctcccgtagatgtgactctcggtgggtgatctcttagtagtgagaatttgtgaacttctggaagggaaaaagctcatggactttggcccaggaaagaatgagcagggaggagctgtgaggcactttctacgggggacccggccccaggcgcatgggagccactggattcaggcccccgtcattttgtgagcgtttcctgtgctctaggaacaccctgatgaccgaagatggggggctgttgactccggaaaccctcatagaaaggggcagagagaccccagctcccccaccttttcctcgtggaagcaatggaagacccaatagggctgaaacctgcccgtgtcccaggaccgtctgcaggggatgggacaatctctgggtcctgtcttgatccaaatatcaggcctccatgcagaggcgtgggggcgcaggctgggggcgtggcgagcagccagggctcccgcgtgtctctttcacaagcacccgccattccatatgccagatgctgacagtaatatccctcaggctctcctgggttgagtttacaactcacacattccacgaggggtgttcatcaaccccgtacgtcaaccccctagcgtcagttgtacatgcagtgaaatttcctgtgcttcagggactgacacccagcctccatgggcagggcaggcgcagcggaggtggggagggctggctgtgtggcttgaaggccaagatcttcctgcttggccacgaaatgcatgcttgactgccagtgtccaaagtgtgtgaggccactgggcatccagcaaaaggccgggaagggattcagggaagtgtgtgggtgggactgggaggagggagtcacctcccgtctgatctgccttaactctttctctctggcttttcatcagtttggttcagctgccaacagagagagccctggctgggtcttctggcccctttgttcccctctgaggacaactctctggcctcccacacctcactctgtctctgactctggcctcctctggtcacctactgtttttattcagcctgaagtccccctggcacgctggaatggagcggcccattatcactcactcactctccacatcctgcgatggcaaatcagctgcttgctcccagatccctccaccagacgccatgtctttctcctggttttctgcagggactggcatccttccctgcacacggatgcatttcctgcctcctcggttgaaagccagttatcagaaaatacccaattaaaatattaccgctttgtggcctctttatcttctctccaccacctccaaattgtttttcattatatttgggcagagtagagaaaagtgcttacttgatggaacgtgttcaccatgtaagcccacacagaattttctagaaagatggtagaatcaagaaggtggtagggggtggcttgctctggtgagaaggagagtgtggggtgttgaggagcagccaggaatgtcttggggagtcatcgccccgtcaggtctgcgtcgggatgccaggtgtttggtcctttgaaggcagtggtggggcagagagctgtctagtgggaggtggctgtgtgggtggtgccctgtacatgtaactccagaccactggagaggccatttgcctgaacaaaaagaaggaattaagaaaaaggccttttttctaaatttgggtagagtaagcatgaaaagagccggcaggagagtctgtaatttagagagggcgtgtggtgaggaggaactggtgacctcgtggtgccatttggacccatacgactcggaccttggtggggagccctgagacagggaggttcacaaggccaggacccagcagaatccccaggttctcagatgacgaggctggtatcccgagagcttttcggaatgtggtgtcagaggctttggaggcaccgtttctttctttcgagaattacctttggaggaactcaacaaagttgaattcgaaaggcaaacatgcaattctgggttatccaagcacctaagtcttcgctggaaacaagacactctacattctcaaactgcttactttgatttgatcagaaatgtatatgtacaaaaatttccttcctaagctgagaatcctgctgagaaattttagcccagagtgcacttagcctgagagagttatcagcactgggggaaaatgaaggctgtgtatgataaaatgtcccaattatggcgacagtgtcagttattccctcggaatatatgtctttatcccatcatcttgtcgggctaatgaatatgaccaaggccatcctctcccattattgctcaataatgggcaatggagatggcgtatcttcgcctttatttttgctggcacatccaggccctgaagcacattaaagtaataaaattaggcagcaagtcatcccagtcactcccaccatgttcccgtaaccccctcatttacaacagactgagacagaaaggaattttttagagcaatttgcgatgaggcaatactggatatgtaaattctgttttattggcagtcactgctgctggctaattctaaatgcctaacagcctttggttcactagccatgctgggtcgggacacagtttggttttaaggccacaaagggggaaatgtataattgcaactttcttccgtgtcttaagctgtggccgaacagatattgtcccatcctgtttctggccagatgttccattccagtggcagatccgagaaggagcctgttaagaagtttaagtttttactgagttggctgactaaggcagtttttattttttgaaaaatttattgctcctaccggctttattccccctaaagaagtagctgccagagttcaggaaatagcaagaaaaacaatttcaagggaaatcactaacttgagtttgagaccagagaccgagcaggcggagagccccgtgcaatataattattctgcagatgccacggtggaaagaggccactgcaagaagggtccattccagaggcagagctttgtctaggggtgcttgaacaagatgcccctcactggaacgggacacacacactcaggagagatttgccacatacacagtgagttataagagggttccaaaagttagagagacgggagaaaaaacgaacacagttgccccacttcgcagaacttattttagactttgctgtgcttcatgtaactactataaaaatgagaggtttacaagctgcagagcaagtcgggactggccaaaacatgcgtccttgcactttcttctccccgctccgcctttgcttggcttgactgctcaaacctgcagtagttaagaaagttccacggtttaagagggttcccaggtcatcagccactgggagttttctctgactcagctctgcacttccacttgctccagaacagggagtgaggaggagatgggggtggccttcgaaatggccatagggtggtgggaccccaaggtggggaacagcctcaggtggacgaggggatgcttttcagggcccatctgccgggacttgttgtgaccacttggatgtatgtgtcataactgtccaccttccacccttcaggctcccagcaacttcaagatacctggagagattctcagaccctcccctctaataggcagagaggaaattaatgctggcgtggggaggggagagtgggagaggatgtgacgcacaggcccagagcttagggactctgaattcagtaatctgggtctattggtgccccttcatatgcagtaaggtcacctattaactctgtgtttatggagctgtatttatcacctggaaagtgatatcatcctgcaagtcttcttatcaatggatcatccaattgggggttcacattgttttgtcttacacattgacaataatgctggtagcatcagccttatctcttgcccgagattggactaaggctgaacttctcacagcatggtttctgaccactggcattgtatcactttggaggaacatgttaaaaattcacattcctaggccccatgcagcaggacccactgaatcaaactctgtatattttttaaattactattttaacattcttttcttttgtatttaggtaaaacttactgcattaggctgttctcgcattgctataaagaaatacctgagagtgggtaatttataaagaaaagaggctgaattggctcaaatgctgcaggctttgtaggaagcatggtgctggcatctgctcagcttctggggcagcctcacaaagctcacagtcgtggaggagggcaaagggggagcaggcacgtcacatggccagagcaggagcaagagagagggaagtgccacgtacttttcaacagctcaatcttgtcaatcttgcaagaactcactgactatcgaaagggcagcagcaaggggatggttctaaaccattcatgagaaatccaccccccgacccaatcacttcccgtcaggccctgcctccaatactggggattacaattcaacatgagattggggctgggacaaatatacaaaccatatcacttatattcagtaaagtacccaaaccttaagacttttatcactcacatacacccgtgtagccaccgtgcagatcaagacatagaacaacattgccaccacccagaagccttccttttgtccttctgagacaatagtatcttccagggacatctgctgttgacttccaccatcatagacaagtttgccctctacctaccctgaatcatgcaggaagctttgagtctggtgtctttctctcaacattgtgtgtgtgagatgcacccacactgttgcttgtataatagctaattcttttccattgtggtgtagtatctcaaggcatggaaatactacactgacacaagtattctactcttgatagtatctgggttgtttccaggttttagctattataccaaagctgctaagaatagttgatccttggagaggatcgagagatagagggaaggaaagggcgtgtctttctttttcacattggtgataaagggagttcccattgctgctccttccatcagtgagctgctgctcagaggcccagtgtggcaggcagtggtgaggtggtggggaaggaagaaagaaaatgctcagtgcagtgcatacatgtgcatgtgcgtgcgtgtgtggtgttctctcccctaacccctacatccaccgccaactccacattgaggctggtaaaatggcctcaggaggatattcgcagcatcctgaccgttcttatcaacctgcaatgattttgcatgtgcatgttgtggtgttggcacttataattgtgagactggctcagatagaaatctccttctccacttgtaggctggttatgatggtgagagtatcggaaattgcccgttttctcagcgtctctttatgattctctggctgaaaggcgttatatttaatgtgaccacagtggacctgaaaaggtaagacaaggcgtctgccttactgaaataactgtacctagttctctgcacacacacacacacacacacacacacacacacctgaggccaacggtgctgcatgggcacgtccatcctcagtcggagtctgaactgaagcccacatgtgggccaagcagtcatgacagggtcggctgggctggagtcaggaaggaggaggagttgggggtgccgtgaagaacctgcttctccagttgctggtcagctgtgactctcccaagcctgtctgagcaccatccctggctgataacactggggagagttaactttttcacctctgtttgttgatatgcccctttgtgctccgtattcacaaaggggcacctcaacaagcccatcatttgttaatgaatgcctttactttcatcgccagcaagacattttcataaacccaccatctactttgcagttctcaagagttgcttctcttaaactggtgaggacgcggctaagccctggaaatgagtccagattctcacggtggcccataaacactgctgtttcctcccacctaggaaacccgcagacctgcagaacctggctcccggaacaaaccctcctttcatgacttttgatggtgaagtcaagacggatgtgaataagatcgaggagttcttagaggagaaattagctcccccgaggtaggcctcagaaaaccagtgttcataacttgattgtcactttcccccactagtagtcagttctaaagctctgggcagtgtgtgtgtgtgtggttttctgcagcccacggtgctcacttccttaatcataaccctggtgtaaccagattagagttcggggacctgggtttcattgtgctgcacctgcagcttggcaatcacagtttgatggcaggaagtgggaggagatgggtccagggtgggtggttggctgtatcctagacaccctgctggaagctatggagtatgtgttaggaagaagtatcatggatttttggacctcgggggagctatttctactccatccccttcgttttactagggaagcacctgagaccagcaaggccaggtggggtcctgtgtcccagaactggccactgccaggaaacagcaacaatccaaacctctccgtccagtgccattctcctagatgttgttacttcccaacctttgagaggaaaagggtcaggaaaacgttgaaggaaagcttttcatttttatgcccagagaaagctgtttttctccattgtatagtattatcttcactaaaacatcacttgtctgtgatcctccaattttgaacttttcaaggtatcccaagctggggacccaacatcccgaatctaattccgcaggaaatgacgtgtttgccaaattctcagcgtttataaaaaacacgaagaaggatgcaaatgagagtgagtacctcccatcctcctgttttgtttcaacacagacttgagtcttagcatggcggcccatacgctcctggggtattcccatctatttcccagtgggtagagaagtgagtctggagctacagaaaaagtgcctccaactttgaatctgcacgtgggcttcaagagatgaatgcttcttttgaggctgggaactcagaaaacaacatttttagggaaaatagtcatcacccaggtgttccggacacaccatgggaatcatgttcaatgatgtttctgccagtccacgtctccccacaggctttccataagtatttttgaataaataaatcacttctagaaggagcaatattgtgtagacagcagtgtgattttccagggaggagtgagccctttattcagatattctacatccacctgctgccttcccagcacccattgcttgctggccacatctcagcgaggaagggaagcaaactccatcacagctggtgaaaagtgacatgcacttgcaaacctctctttgtgatttcttgcccttctgttttagttcatgaaaagaacctgctgaaggccctgaggaagctggataattacttaaatagccctctgcctgatgaaatagatgcctacagcaccgaggatgtcactgtttctggaaggaagtttctggatggggacgagctgacgctggctgactgcaacctcttacccaagctccatattattaaggttcatcttccctcccgacacgtgtgccgagtacacgaacggggctttgttttattttgtttttacttgtgtttgggccagacatttaaacagtctgaaatgtggagacttggattaaaaacactagttctgttcggggcagccaagccccagctttcacacacacagaagatgggcttcgggtgttctcagaaagtgcctgggaacatggccccaccttctgcttctctctcagccttactcacacagcctaaagacaggttatgtgaaagcagcctgaggaatttcgtagattatacctggtgttagcaattgagaattagagatgaggctcgtagaatctggggctattcaaatgtgaacgcagtctactgttggtgattgtagggctccacatggccccttctagggatgacagaggagtgttctattagcttttaacagtgacccttggccaggtgcagtggctcatgcctgtaatcccagtgatttgggaggctgaggtgggaggattgcttgaggccaggagttcaagaccagccagggcaacatagcgagaccccatctatacaaaaaataaaaaaaaaaaattagctgggcatggtggtgtgtgcctgtagtcccagccacatgggaggctgaagctggaggatcacttgagcccaggaacctgaggctgcagcaagttaaggaggtggcactgcactctggcctgggtgacagagtgagaccccatctctaaaaacaattaggttattaattatttatttattttaaaaaaacattgaccctcaacatccaggaagcagctggcagcttttggctgagtctctgccatatttgttgccctgccttcccatatagtagctgaacatgatttaagagccatgagtcatgtattattagggcttaaagacctgccagacccgtggttctccaatgttagtaggcatacaaactgtctggggagctttttagaaatgtgagtccccgggccaggcatggcggctcacgcctgtaatcccagcactttgggaggccaaggcgggcaggtcacgaagtcaggagatcgagaccatcctggctaacatggtgaaactccctatctactaaaaatacaaaaaattagccaggtgtggtggcgggcacctgtactcccagctacctggggggctgaggcaggagaatcgcttgaacccgggaggcagacattgcagtgagccaagatcacaccactgaactccagcttgggtgacagagcaagactccgtctcagaaaaaaaacaaaaaacaaacaaacaaaaaccccaaaaaaacaagaaatgtaagtccccgacccactgcctgcgctagtaaatcggagcttccaagagtgacccctggagctccaagcggatatccccacactcggactctgtagctgttgctgtctctcagcacagcagcgctcccagccgctctatcacttatagaagttgaatgtgattgctgtgatgagattgctatgtccttggcccttagcagctccagatacctcaggaagaagcccatgcctggctctggggcatttttatgattaaaatcctgccagggccagagccaggtggttggtataagtgtaggggagatgggagaaacaccaggaaaaataagtcatggactgtttgttctaataacacatttagttagcatttagaaattacaaggtagcggccaggcgcagtggctcatgcctgtaatcccagcactttgggaggccaagatgggcagatcacttgaggccaggagtttgagaccagcctggccaacatggagaaaccctatctctacaaaaaataaaaaaattagctaggtgtggtggtgtgcgcctgtagtcccatgcatttgggaggctgaggcacgagaatcatttgaacccaggaggcggaggttgcagtgagcactcactccagcctgggcaacagagcaagactctgtcaaataaacaaacaaataaataaataaataaataaataaataaataaataaataaattacatgttagcttcacacagtctatggtgctgaggctcctgtgggctcccggccacccctggtgactctgcttcattcttttgcctttgtcttcctgcatttcttctttctatcctcttcccctctcggtcctggccctgttgctcccttcttctcccttcctttttgtgcgtgaggatactgacttgaaatgcaggccttcaggaggttgctgatcccttgggcagatgtcttttcaatagctttgccagtccaccaatatccaaaatttaatgaaagcatctccacccctcaaaacctgctaaatttgggagctgccttctaacaggatatttatgtagctgtgttttgattgagtcccttttggtaaatgctttttagtccctactgtgaccagcgtagcattgcagaaacacatgaaacttgaagaagagggggagaaatatcccagccacagagcattcatggccccttgtttagctcccatgagaaaagacgattttaaatttcagtagaaagggtaagctttagagtgagattgcagttcatggctccactataagacccagaagaaaaatctgcaaggccatttagcactcacaatacccaacagcttaatgatcttccaggatggagtacttctgaaaggaaatgagaatcaatctaagggaattatggtaaaagatgagagtgtgaagggatttataatttattcccctgccagaaacccagcaaaaacaatatcaaaatagggtattagcttcatcttttttgtaaaactacaaagggatgacagatcatcgacttaaagagtaggaagcttctttcagtgggaggagccacagaaccattacatgtttctccgtatctttagcaaagttcagatttctcaaaaggtaaagaacacagtcctgaaatacccaactcaaacttctttgcttgaggcctagagcatgagatgggccaggagggaatcacagaacttccctatagagacccttgttgagctgagatctctagggaggcagaattgaaggaggagccacacagagacgccatctttctaggctgtgacccagcacctaatccagaggaacagtctggaggggaggtaaagagggaggaaaggagggaagtggcattttgcattgtgactgctgagcagagaaaagaatctaggccccagccagtcaagagagagactagaattgcccaaacttcgtttctagccacagtggccttctgcctaatctgtgagcctcagagtggaggatgccctaaccctaaccctaaccctaaccctaaccctaaccctaaccgtaactctaaccctaaccccagccctaaccccaactctaatgtgtctctctggggcagagcagtggttggcgacaaggtgcttgggagcaaatattccagttggttggccacctgccctgtctcactccctttgccctccccactgcttttaagcaaatgataggtccagtagatctgcctcattcaaagaaggccaataccagagagaatgccagtgagaccttggggtagacagagttgattgaaaagaagggggtggggggaggaatgataaagacaagaaacaaaaacagaaaaagacagatgggaaatacatatatgatcaagaactgctcctccagcacattaaagaacgtttcttacagaaatttttctacagcctcaaagaaatgaaagagaatatgggctttttgagaaaaatctcaaagacaagacacaagatgttcaaaaatatattatcacaaaggggatggaaatcaggctggaagagctcaagaagaaaagtaaagacaaataaaagaactgcagaaataaaagtcctgttagaagcagtaagacacagacgaagacattgctgaaattgatttcctctgacattcgcacacatcttatagagttggttttggcatgtggaatgtgtttgtagccgtgctgtcagtgatttggaagacaagcctgagaaaaatcatctaaaatcaagtggggaagaataaaaaaggtgattagagagatcccagatatacatgatcaggaacaagagaacagaaaaggaaaaggaaaggaaaaaaaaataaaagaaaacgagagaatgttcaatggggaaattactttgaactaaaggatgacctgaatcttcagtttaaatgacatgccatgttaaacattgccccagaaagatcaacacactgagacatacttgatacattactgagctttgagaataaaaaacaaccctttttggcacctagacaataataatactgtaataccaacaacagtaataataataaaaagaatgaaatagagtaaagccagtgaaacagggaagaaattcagactggccccagatgtcttcatgaacccattaaaaatcagaaaattgtggtttaacatctacagagaattaaagaaaatgatgtatgaggtaagaattttatatctaggcaattaccgttttgacctagacctctggtctcttttttaaaaaacataaaattgttctatgatgaaataacaaaatcataatcaaagtaagaatccagaaacagagaaggtgtgtgaaataaaagaacaggccctaaacagagaacccctttaaatctgaaactagtcctaagaccaaacagcagtgggaattatacggacagaatagagtcagaatataataaactatgtcattaccaccattggaaggaggataatacagaagaaatggaaagaagcacagatacataaattccctcatttgtcatcatcaggagttaacaggcagcatctaaaattagtaaatcaaggccgggtgcagtggctcacacctgtaattccagaactttgggtggctgaggcgggtggatcacttgaggccaggagttcgagatcagcctgggcaaaatggtgaaaccccgtctctactaaaaagacaaaaattagctaggtatggtggtgcacacctgtaatcccagctactcgggaggctgagggaggaaaatcgcttgaacctgggaggtggaggttgcagtgagccgagatcctccactgtactccagcctgggtgacagagcgagactgtctcaaaaaaacaaaaaaaaaaaaaaaaaacttgataaatcaagaaatagagaattcctatatatttaaatttatgtaggaaaccactggagaattaacatgaccataaaccttttaaatgaccagaaagagggacacacacatgcatacagaagaaagaaaaccaagttcagtgtcacgttcataggcatggccttaaacaatgtactcaggaatgttaaaataaaaagatgggcaaagaaaaaccaggtacatacaaacaaaagtaaaacggacttcttaacatgagcatcaagaagttggcattcaaggaagaggtgtcaaacaatttaggaggctctctgaaaattatatggtccttctttgctgtcacattgcatcaatgactgctggcctccaaagtctgcgcagtaagccccaaagatcttctcattaaccccatgcctgcatcatgcagacatcctgggaaccagtgggacaggaggcagcaaagcccaactggcctttatggctctgggtctccacttcaggttgaattgtgccctcctcccaattcctgtgttgagatcctaacccccagtagctcagaatgtgaccttatttaaaaataggatctttgcagatgtaattagttaaaataaagtcatcgtggagtgagatggacctaatccaggatggccagtatcgttgcaaactggggaaatttggaaagagagacacagggagaaggctctgtgaagatggagttatgcttgcacagccaaggcactgccagaagtggagagagagccttccctaatgccttcagaggatccatgaccctgctgataccctgatcttggacttctggcccccagaactaggaatcagtaaacttctgttgttctaagcctcccagcatgtgttactttattatggcaaccctagcaaactggtacagtccccagtgttctgcacatctttgtgactaattccccaactgtacccctcttgctagaggaagtatctcacactgctgtgtttctcttggtgctgtctctcgactgcttcttccttacacccaccatccccatgagggtagggatttgcatctgctttgttcatgaatctctcctccgcacaggcgggccccacgatcagacgatgctcttagtggcagcatgatggcattcaggaggattaacatgcacagatgtttgggactggagaagtgaggttcagcaagtaggaagaagagagggcaccatttaaacagcagatccaccatgcgtctttattcacatagcaccaagtaacacagtagcacaacatatggaaagaaagtaacaggcaacacaaagagaaatccaccagagtccagagcatactcgtgccagcggattccaagacccatctgtgacaaactggtgggcagaactatgtgcagtcactgtagtgagtacaggaacttcatagccctcctcacacccaagatggccctatgcaagtcaagatgccgtggtgggtagcccggatgactgtgggatgacatgggaaactgggaaagaatgtattgcatgcctcagaagaatggactgtctgacttgggagcctaccttagcaagttttccctttactgatcattttctcttcattttcagattgtggccaagaagtacagagattttgaatttccttctgaaatgactggcatctggagatacttgaataatgcttatgctagagatgagttcacaaatacgtgtccagctgatcaagagattgaacacgcatattcagatgttgcaaaaagaatgaaatgaagctgggctgttttctgtcttatttctcagttgagtgagcaaggatacgaaaacagtgtgtttgaaaacaaattaggtttgggttcaattccttcaatttttaaaaaactggtctctgagagttttttaaatcattgagagcctgtttttcttctctaaaacattagtttaattttcttcaaaatgaaaatactgctttgtaattacaaaatgagacacacctatcttgatattttaaagcaatatcagagggtgtaaagaaggacattttaacaatcgccttcaattttactccacttaattaccgaaaacttactggagaacatgttccaaatcttcagtatcttgttctctctctctctctctctctctctctctatcacacacacacacacacacacacacacacacacacacaatttcattcatatatggtattgcattattttattttaaagcactggtgaggggacctcttggtgattcctggatgatcatacacagaggacttacaccatacaaaaatattgggcaccgcagtgccagagaagatgcttgaggttagattttaaggagtggggaattgtgaagcccacagatgcgcacgcaatgaccagcaggaaccggaagccctgggtcacccccactctgcctcatttctgcctccaggatgccactgcctctgcttccaggaaaggcaagggggagggtgcttatccgtgtctctggttccagcttcctgtctttgctccctcccctctcttagagactgtgccttcagcaggactcttaatatctgctgcaacttggagaacctccctgccctgaaatgtgaaccaagcacactttggttccttctccgggcggctctctctgagacccaaggctgcagtccctcagtgctggtggtatcgtgtggggatagcaatacttctctgcccttcattgtctcatctagacatcaagcagggaaaatccagggagattaaattcatggtgacaagtcctgggcagttctggtaaacggtccagttagggagggagtagaaactattgactcaaaagagtttctggctgatctgtggctttgcctccaccatccctaaccaacctctcatcacagctttgtgtgtgggctgagtgctggccttaaccctaggcgtggaagagaaaatgtgaggttgtttagatactcatcaggacctcacaggagctgagacttatcagccagaatgtgttcttcggacagtcgtacacatcttacagaaaaccctccttgtagagttggttgtggtatgtgtttgatgctataaagctcatttttaatgtgtacacctgctctagggacgattcgtttgaaagagagtaagatgcattaacagaaactatcctgggattaggtgaaaaatgtctagcaaaagaaacaaagtctttaatagagtggcctctttcgctcttcgattatgactgctgcagttttaccccagcagtcagctgtctttgtcaaccatacgtttttggagattgggtctagcacatgtcacccttgtccacgttgtttcacatctggttagggggcagattttaaaatgtagttttgtaatgttacatttaagcatgataaatgattagactaccagatgttactagtgctaactttgtattcttagacattaaaatgattgacataaactctttgtgccttgaaaatgaaacaaattataaaaatgtttaaatggaaccaatttcttttgggttttattttttattttttattattttttgcattccccattctccatttaggtttcaagaaataaaatgaatggtatgggcttcttttaaaatggtgaggacaggcctggcataccggcatagtggctcatgtctgtaatcccagcactttgggaggccgagacaggcagatcacctgaggtcaggagttcaagaccagcctggccaacctggtgaaaccccatctctactaaaaatacaaaaattagctaggcatggtggtgggcacctgtagtcctagctactagggaggctgaggtgggaggatacctcgagcctgggaggtggaggttgcagtgacctgagatcacaccactgcactctagcctgggcaacagagtgagaccctgtctcaaaatgaaatgaaatgaaatgaaatgaaatgaaatgaaatgaaatgaaatgaaaaacaaaataaaataaaataaaataaaataaaataaaataaaataaaataaaataaaataatggtgagagcaagtttgaacctgagattatgggcatttgaattagagacaatccatacttcagttgtgaatcacaaagacattttaaaggaaccttaaagaggcctccaaagacacccatgaacagtccttgtccaggtgactggcatcgacaccctgctgggtgttcttgttctacttttacgtggagttgtaggaaaggagctggttctgggtggtcttccccagccctgtcccaactctgccttcagctccgcccccagcccacacctcttgattctcctaaaaacctacatgtgtgtaaggaggtaagaaatattccagagctgttctgctggaccaaaatcttcattacagtgtgttttaaaaaacaaaatgcatttgttcttcaagagataccatacaaaatgtaaacatggacgaataatgaacaaattcttcttttcaggctgtgtggaagtttttctggacggagaggattccattctcaattctagttgcccgagaggcttgaaaattagttcataaaaacccaaactttacctttttttttatttaattgagatggagtctcgctttgtcgcccaagctggagtgcagtagctcgatcttggctcactgcaacctctgcctcccaggttcaagcgattttcctgcctcagcctcccaagtagctgggattacagggcaccacatcaggctaatttttttgtttttagtagagatggggtttcaccgtgctgccaaggctggtctcaaactcctgagctcaggcgatccacttgcctcgcctcccaaagtgctgggattacaggtgtgagccaccacgcccggcctccaaactttccttaagaacacagaatgtcctaaagcaggctggaagggaacatgagagcatcacaaggttctactttgtggatactgcagcatacggaaatgcaatgacagaatccgcccagaagaggacttccagagaccagaggtctcaatcatttccattctataagtctatctctaagaattgattatatgttcaagcccttcacccccaagataggcggacagacagacacacacacacactagacacacatacgtgtatacaccaatttgtgacaccattgtcacacactctcacatactcataagcacactcccacagacagacattcatgcacaccctccacccccaccccgcatgcaggatgaactccttcccctctcaccctcccccagtcgtaagcagtaactcactcttagcacaacccaccctgccctgaagttcccccttccagtggttcataattaggctttggaaaattttagattaatggcttttttttttacattttaattttttttgagactgggtctcactctgtcgcccagactggagtgcagtggcgtgatttcggctcactgcatctctgcaccccatccccagtacccaccaccacaggctcaagcaatcctcccacctcagactcctgagtagctgggaccacagacacacaccaccacgcctagctatttttttttttttttttgcatttttagtagagacagggtctcaccatgttgcccaggctggtctcaaactcctgagctcaagcaatccatgcgctgtggcctcccaaagtgctgggattacaggcatgagccaccatgtccagcaggcattaaaaaaattttttttttacaagaaaatctcaacccttcttttattttacagttaagagaaccaagatgtccttcattctaagcacacataattaacaaagccctacatacatgaaatggatgcattgggggatgctattcacatgacaaaatgacttctctttccatatatgggtgtaagtctcaattatcctgtggccaatttcccttcacacattggtattttggtttaataaattacatgcatttcaggccatggccactttgtaagggatgtgtgtggcctctggtcacaaagggactgactacactgttcctcagggcctttgcaggtctggggtgtcaggaagccctttctgcttctgggatctcagggacccagcaggagtggcacctgccattgcagctggtggattgacacggtcattgttcccattgcagagggttctggtggagtcctctatgagccttgccttgaaggaggccatttaggcaggcagagtcgaaagctgcctggggaagtggcgggtcaagtcatggtccagaggaaattgtgttcagcagcatggagctgcatatttgggaggaggaagccatttacttaggttataaggcctgggatcgggccaccaatgggatcttatccaacctgtattcattttacccttttgtgggactgcctaccctattgttcagtcctaccctattgttctggctcccatggcccctggctctgtaagcttgtcctaacaacattctggaagagaaactatttttcttgatgacacctccctctcccatctcttcctcgatccccttctgtagtggattctgtgatgtactcctgggtgagtggacaaggacagtagccatcagtggctggcctaggattccccatggttcagccgatctgctgggctctgtctccctgcaaaggcctctttccaggtggctgacacttgcgagtctgagttaggtctgtttctgaagctctgacctacacatgtaaccagcacctgctaggacattctgaggctctttaaatcttttggatctacccaggttccaggagaattccagggcccggggacagaaccgtccttgcttagaatgcttcttggttttgttaaaggggatgtattcaaatagcattaaggtttttgttttcctgcttgctttttccttcctggcgttaagatgtaacaagttctgccgggtgcagtggctcacacccataataccaacactttgggatgctgaggtaggaggattgcttgaactcaagagcttgaggccagcttggaccacatagcgagaccttgtctttactaaaattaaaacaaattagccgggcaggatggcgcctgcctataatcccagcactttgagaggctgaggtgggaggattgcttgaactcaagagtttgagatcagcctgggcaacatagcaaggccttgtctctactaaaactaaaaaaaattagctgggtggagtggtgcctgtctgtagtcccagctattcaggaggttgaggcaggaggattgttggagcctgggagatggagtccacagtgagctgtgtagatggactcttgctctgtttcccaggctggagtgcaatgatgcgatctcagctcactgcaacctctgcctcccaagttcaagtgattctcctgcctcagcctcccaagtagctgggattataggcactcaccaccacactggctgattttgtatttttagtagagacggggtttctcattgttggcctggctgatctggaactcctaacctgaggtgatcccccacccctgcctcagcctcccaaagtgctaggattacaggcatgagccatcacacccggcccacctctggcatatctgaatgaacatttaacctctcagtctcactcttctcatctggaaaattggaacaatatctcacaatcatgtagaaggtggtatcttagaagttctctataaaagctgcaaagcagctgactgtatacaatttaatttttctggaatttgttcttcttatggggtaacagccctaaaaaacgtaatttgtcaaaatggacagggtttgagtttacgagtgtctaagaccttgaaccttcctcacagaggcagaaggcggttatgctctgaattcctggctccctacaacaaggcagcaccctgtgatattggtcattactcagttgtccccctcggccggtcactgggggctgtccagggcaggtccagctgtctgtcaggcacagtgaactggacagcctccacagtgggctgacagctctatctgggagccctctagtctggcttggagacactgttttcagttgtgtgatatttacttgaggctctcaggagtggaaaagcagatcaatcaatgtgggtggtctccctaatgtcaaagccctcctcccacccaggccaggctctcatcctcaccactaggtggcgcttcctcccattccctgtagccaggtgggctttaccttgacaggtactattgggttgacccccatggactgatgcccacacagccttgggacttcatccaaacctagcccagccctctgggtgtcagcccagggtggcccacgcatcaaagggtggcctttccgggccagagaagccaagcgtgaaatgaccctgctggtctcagccccagcttccaggacggccacacccaggctgtgttttctgatgtgctaaggagtgtctgcaggaggaggaggagctcccctctgtcctgtggctttctgttttgccatggaaataccttcaaggacaagaaggcccttgtcacgcctaactcgaagacaacttgctcttggtacctctcacccattttctttttgtgaaaacagacagtgttgggggagtagctgggcaccacctcatgtacttcagaagttggagagaactctctgaccactctgaaaccttccctctccaaacccaggagcccatggctcagagatgggtaaggagctgatggaaggggcaaggttctggatcctgaggtccgagactcctgcttcctttccttgctagccctggctcttggggccagcacacctccctgggcccacctgtcctcatagctcctgccccagaaggcccagggcagcctgtgcaggtggtcagtgggagaaggcagtctccccgctgcaccccatggctgtgtcccccaaacttcctctatggctcctcgcctgaccctgagggatgggggcgctgcacatggtggggtcagagggtaaggaagtggggttccgctgctggtgggagcacagagatcactgctggacactcaagcgtccatggggatgagcccctatcctatggccaaattaattgttcccccattaattgccaagcaatcaatacatccatttatttgatttcattgtataactgtattgaaaacagtccggggtctggacacctggtccctctggctggccaggtcttggtccttggactaccatctagtctgtgcctcagctgttttgctggctgagaagaagaaaaaagtgatgattttactgtgatatgtttgtgacttttatcacaatgcagtgctcagctcctctgtcaccaaagcctaccttttttctggctcttttttggatcctggagggctgacttaagcaaatccttagtaaaggaaagaacccagcagcctctcctcaaaccagtaggcagcttccatacagcctcacagacaggtggcccaggagtgactttatccacatttttctgctcagaaaaacaaaccaccaaatctaaaaaagagattgaccttgaggtttccaggaacaggacttaaaggggtgtggagaaggggtggggaaggggtaaggaagagatagggaggaaggaagggaggaaatgggaggagagagactccatggcaacggcagaggagattgtggcacaggccacaggtgtgtaagccccatagaccttctgggaagctgcaatttgctttgtgatgagatttgtgaatagggggaggccagtggcccccagacctgcctggacactcttcccggactccagccagccctttcttgtcatttcatgtgttaaatcatttaaaatgtatagagtagtatatacttatcatttggatacattttccccaaaatgtggactgaactaagataaaagaaaaaacacaagttattttcctaaggttctttgcctcttcatttttatatgtgtcactgactgagctgcagaggcctgtttctggtcacatgattccttctcatgatcttgggatctcccacatttggagccaagaaagagagaaaatgagataggaaggtgcctggagttcttggacagtgctgagtggtaggacttgctttgcctccattggtatctttcaatggcttgtttttgtttttgttgttgttgtttttcagctcataaatgacttactggtcccaaaagacagtattgttcacaagaaaaactttgggtcttttgatggtagttcaggcgctgggcagacctttctgctgcatactttggcacattttcaccagcttgggcaagggaaagaatttgttgtttcgagtacagtactggaatgcataaagattaaaaagaaggcaacaaaaatgctcttgcttttaaaaaatgtgcaattccaatgagaaaatagaatagtggccagaaagagacccaagaacaagtatcgtggaaaccaaatgaataagtgggcgaagtatacacttaagaacttttgcaaagttgccgaggctgaggggctgctaccacaaataaagtaatgagagtgatgatatacatttgcagagcagtttacagtgtgcaaagcctacacaagcactgtgtcgttccagaggtcatgagtgtgtgtcactcactgatgaggaggttgtgacggcagccacctcgcttgcctggtggtcatgcaggtcttgcctagtagtcatgcaggggtcttatttgcttctccctcatgagtaaagggtgtggggcaccacaaggactctgttctgccaactttgggggccttgccccatctagagggggcagaacgtttcagttggagaattggtggcttaaaggcttactgatggcagtagacggagggaagagtgatggctgaaggctcgtctgcctggaatctttcatctgaaaactaaaaacttgggctagattttttttttgttttttgtctctctcttttttttttttttttttttgggatggagtctggctcttttgcccaggctggagtgcaatggtgccatctcggctcactgcaacctccacctcccaggttcaagcaattatcctgcctcagcctcctgagtagctgggattacaggtgtctgccaccacgcccagctaattttttttttgtatttttagtagagacgaggtttcaccatgttgcccaagctggtcttaaactactgacctcaggtgatctgcctgcctcagcctcccaaagtgctgggattacaggtgtgagccaccgcacccagcaattggtgggttttcattcctggctccatatgagaatcatcggtgtggctgtaaaaactactaatgcctatgacacacttcagaccagctgaatgagaatctctgggcttggacattggtgttgttaaactctccccaggtgattctcagggggagcaggattaacagccattggctggatgctctgtaaagtgatttctagctctgtctaatgtctgggggatgggttaaaacagcatctggtgggactgggcgacgaacagaagtgatagagaaggctgcacctaccaagtatttctactcttggggaagttggttgagattagctctgggcgcacatataaaacccagtgtactggattatacagagtcccctcaaaattcgtgtctacccaaagactctgaatgtgatcttatttggaaaaagggtctctgccaaggtaactggtaagtttggatgagctcatgctagattaaggtgggcactaagccctatgtgacgcatgtcctcaaaagaagagaagacacacagacacacacagaggagaaggccatgtgagaacagaggaagaggctggagtgatgcagccacagccaaggaagggcgaggatggtcaccaaccggcagaagctgggagaggcaaggaaagattcttccttccagcctttgaagggagcacagccctgctgacacctggatttgagactcctggcctccagaacagtgagagaataatacgcttctgttgttttcatccacccagtctgtggtattttgttactgcagccacaggaaactaagccactcggtaaggtttgggtctcaagacagctgaatcacctcgtcattgcttagcaatgaaagatgctagagctgatagcacagctaacatgagaggaaagctgggctgtcaggagagctgtgtcctgtttccaggcacagcaaggacagctgggttcagactgaagcaagacccgaaatggatgccctgttggagagcattggtgatttaccctacaggcaaccattggctcattttgtgctacaggaaaggtgagcagatgggaagtagctgaaagacttgagttttggtcttgcctctgtcacttctggctgtgtggctctgggaaaagcagctaatgtctctggacctcagttcctcatttgttaagtgcaggaactagatgacataatctgctatgcagtttccagctgttaagttctaaacgctaagccagagagagacaggtttagcatcagtaataacatatgagaatagtcccccaggcataggaatgcatcatgctccttgcagctcatgccccaggtctgattctgagttcagacattgctagccacttgctttagggatttttggtagacatgttgctttctggtacagctactcctaaatttaggacattaatgtagtctgtgtctaaattagcaatgtctaatcattcgattgtctaacatcaaaggattaatcacctacaagatctaatgagcttcttttcctagaacacattctacatgatcaaccagacctttgatgaccccaacagccagagatcttatgagcctttcccaggacccccaccacctgcctctcatccatgcagcaattcatcaggcctgtatataaaacaagccttgactttgaggattcaccttgaggggaaaagtgggtctagaaaacatggatatggagaaaatgtgggtacgtttcctctctgcagttcctaggatgtcgcattagttttctgtcatgtaaccacaaacttagtggcttaacacaacttgtatttatcatcccacagcttccttgagtcaggaatctaggcgaggagtagctgggacttttgcttcgggtgtcactggctaaactcgaggtcagcccagggttgtgattctgatgtgagtgagattcgaagtctgcttccaagctcactggttgctgatggaattctgctctttgcatttgtgggactgagggtctcagctctgagagaccactcgcttgccacacagccttctccataacatggcagtttgcttcttcaaggccaatgggagaatgtctctgctgcctcaaatctttccgactttctccgtttctgacctctagaccttctttcaaaaggctcacatgattaggtcagcccctcccaggataggtagtctccactctgattaacttaaagtcaaccgatgaaatcaggctgataggggataatgtcccaaaacagtcaactgataaggaacttcagttacatatgcaaaatcccttcccctttgccctataatgcaggctaatcagaggagtggtattccatcgtattcataggtcctacccaccctcgagggtgggagagttacacagggcatgaacaccaaggcccaggaatcttggggtcatcttcaaattatcctgctagagatgagtctggggatctgtgataacccttccaggggaagtcgccctcatcaatacacaagccagggttgagatcagctgggatagtaaaacctcactttttcagggggtcccaggccataccctagcatcaggtgtctgctgcatatcttcttggcaagtttccttgagacacttttacttctaatccttaggctcaaacacctgtggagcgggaagtatggcatttccgcgaagtcctcttgacttgagtcccaggtccctctgacaaagcaggagtttgttgacctgctagtcctggcaccaaatgtacctatttactcagcttttgccagagggtggggagagagggtggagaagaaggaagggctcttttgcagttggtcaatgaaatgctttgttataattttgcttcatgttgtgcaggtggccaagtgtcttgggtacaaggtaaacagatttctcccccttggtcttccctgcattcagtccccagccagtgggtcacattcagaataataataggaataataaaggtcacagtccctgctgctgtaagaaagattatctttagaaagaaacaaatagtctgggaggagttacgtggagtttagaaaaacaaaacagacaccaacttgtcctgattctctgtgagtttcatcccgtgttattcatcaatgcctgtttggtggtttcatgtcttgatgcatcttttattgtccatcctttggccatggatactcttggatgatgcatcaaaccaagcatagtttttcaagtgacaagagttgtggggataatggactgggtttctcttacttgtgttgcaagacacttcagagtcataagcctacggatttttgtttgtttgtttgctttttattttttgagatggagtcttgctctgtcacccagcctggagtgcagtggcgcactctcagctcactcaacctctgcttcccaggttcaagcgattctcctgcctcagcctcctgagtagctggcattacaagtgtgcaccatcatgcccagttaatttttatatttttagtagagatagggtttcaccatgttggccagactggtttcaaactcctgtcctcaagtgatccacccaccttggcctcccaaagtgctgagattacaggtgtgagccactacgactggccaagcctatggattttaaattacgaggacatgaaaatcgctgtcaaaataagaacgctgagttggagagtggaggtaaaaatgtcactctgggtttgtgtggacacaagaaccaagagaggcctccttgtaaaatgaaacatgtcagagcagacactacgtggccagagacctagtccccagacctcagacttcttagtgcacaatgagaaatctggcctacacgttgtctccagagttcttttttttagcagtaaaatgccttgattctatatgacacacaattctccacacagcctgtgtagctatgtcatgactttacaactttcataagagccacttccaaataagtcatgaacatctcacagcaggaagagatggcaggtgaccagctctcaagtttgggttggtttgctaattttcaccagaaaatcatctcctggggacagatattaaataatgcaatgccattatgtcttaaaaaattaaattaaaatttaaaaaatactatttaccattctggttcttgagtttttatgttctgggaacaaaataacatttttattttgttttgagagagataaaaacaaccaaggcattctgactttgttctcagtagctatctcattattaaagttgaatgcaataaaagcagtttccttggtgagaaatgaatatatggtttcaaccacaatatgtcttcacagataaaatgattcctatctgtattaataagaacattttctgggcctccctgtgaatgtgatcttcacagaataacatgttcccaccttgtcctgaggaccagatccaagaaatgttctccacgagtataggtgagatttgacttggctctgtaagacatttccgggtaggaataattactagacaccgaaatggctgaaatgagggggaacgacgtttcctctcaggagatcttgataaaggaaacatctcctctctcggagatgtcctaggttggccctgtccggcagccagagaactggttagatcacctatcagagtgatatcaatgatgttgattttctgtgaaagagcttctactcggtatttctgagaagtctgacaattcatttccatttttaaagaggagaagcttttgaaacgcagtggcactcacaggcaaaatttgaaacgctaccctcagggaccaccatgttcgcaatgccaaggcaggggccttttgcacctggaatactaggcttccctgttttggtgaagcccctgaggtgttttcctgatgggcttgatagtgcaatggtgatttcccaccccaggaaatctaatccttaaatcccgagatcacaagagccttctctgtttgctcaatggagtctggccagtcctggctctctcccatgctgtgtaaaagtttggatctagaactcagagtctgattattcgctaatgcctgaagctcatttttgtggcaccatgtaatatcaggagaatggcaggtcccagctgcccactttccctctccccatcctcaggccttcaggatataccgtttatacatgtgcatatgtgtttgacaatatgaaacatacggatttcagatcccctcttcataaggggaatggaggaggaagttgaagtggatgagaatccaggaacagggtttagcattggtgagagtggcaagatgactcagtcttggatttttaatcaagggatcttagtgaagaacagcatatcctttgttgggcagaatataaaaatgcaaaacagaagccagtagagatttaataaacagagcaatcagtagggcttggcagggagatgggcacacaatggctgctttaacctggtagagatgagctttggtgcgatggtgaatgttggtttccattgacattgacttgagttgactcaggagtcaatgaagaacattttggatcaatttggatgattatccacaagcagtaatcctacagtgttcactgttttccagaacttttaaaacaatagaaagggttattcagggataaagcatttttcctttttcaaatgctttcagagtttggctcaccttatttgggtgaggcatataagtatggttagtgtgggtattgaggctaccaaacagttgtagatgtttctttaagaccaatcttaccagtcttattccccatctttctttctcctacctcctgaactgggactcaaaatgactgggcaaaacattgcgtggccttgggcaaattgtttgattttgctgaatctcaacttactcacctggaaaacaccttttctacccagctcttggaactgttatgagaatgaatgggaaagtgcataaaaattggaaatactagatacaagcaaagattatgttttctcctggtttggggctaggtttttgtatacaataagtgtttccatcagaagcaattgacaccaatgcagagccatcaataggaggagaatttgcatttggacaactccttgaaggatgaagaaagaggcttcaggaggcagagcagccttatgggcagagagctgagtggaagaatcaagtcagtctgttgtggaggaggccttgaataggccactttttctcctcaatgccaacaagaatcacacctgtctttttgagattgcaagaggaaatggaagaaaaattatcttgaccttgtctaagcaacagtgtcaaggggtgctatctcactccaaaatacttttaatgttaactgcctagctctgtcccagataccgtttgtccctgaaaaacctcctcaggaagagcccctcgacctgggagcctggaaggaggttctctttgaatctaggttgcttctgaagccatagccaagcacaagccaagatgtggataaggggacccttatcaacatctagtctgattgacttcctctagttgaaaacgcatgggaagggccttgaaaggcataagtcatatttctgccttctgtgcttttagctgttccccattgtatcatctagattgtgagtcactgttaaaaatgaccataaatctttagagaaagcaagtattaggttggtgcaaaaggaatttcagttttcgccatgaaaagagatggcaaaaccagcaattccttttgcgccaacctaatattacaaagcagctgggattacatgagagaacacataggaatgcaaggtgtaacacacgtgttcattatgttgatggttatctggttagtcactaactttctaaattaattgagaaacttttttaagaaccagaatagagatgggcgtgactaagagaaaatgtttaagaccaaagaacatcaaccctccttttaacccactagttgagagctacactacttacctcccaaaaatggcttttgtgtccaggagctccaggccctgaaggatgctgctttgcttaggaagaaagagtggcagacttctcatgggctgatgtgccaagaatggctgaggttgggtctcagtggatggcagggcttgcagggaaggcagcagacaaaaccctggaaatctggctcaacacaaaagttaagaatgggtcttacatgaaatacattgggtgtcagtgtcaagaatgccaaggccctaatttttacattatcgtctcctaaagacaaccatgggggctggcttgtcatctctgtatgtcaatattccatatttgccctttccttttgaggatatggaaccagtcctggtaattctccccacttgagtatgtccgaggacggatacctcttcatatactcagtcatgggtgaagattacattcttgagtgaaacgcatccttggagatgccaaagagaaaaacaaaggtacaattttttgatctattctagagacaggagaaggacccgttttctatatctggtcccaggatcatctctcttggggcattggccatggagccaacactgggttctgtggagcccgcaactttagcttcctaaaaaactccttcaggacttgctgcacagggacagcatctcaacttagatcaggctctgagtccatactagaatctggtctggcctccttcaaggggatctcctgcccctgtgagtttcctgagtcctggcctcagttttctcctcttttactgagctctttcctggcccatcacttggggctgatctctgtgagttcaagatttgaaaagtggttgctgttctgactggtgcctttgctgcctaagatttcatgaagatgatagcactgcagatgacacaaggaagggtactttagaccttttctgctcagataactttggagataaaggcaacattagcaattatacaagacaaatttcagctgaagaagcccagagagcttaaattacttgccctaggtcccttggccacatacagcaatgctggaactagtattcaaaccttgtgattcatagttgacaacaatccatgcgtggttggggttctcgaaatgtagtccttggaccagcagcatcatatcatctgggaaagcattagaaatgcaaattatcaagccccatccagacctactgagtcagaagctctgcaatctctgctttaaccagccctctagggaattcaaatacttgctacggtttgagaaacagtgttctgtgccgtgctaaattaaaccttttgtgggacagttcagtatttttcatcatttgtagaagagttgagtgcttaccaatgatctctatcacacttgattcttttattcatttctacacttaatcttgaatgcccattcccatattaggcaccatatggatcagaaggacatattgaacaaagatccttccttcaaggagctcataggagtcacaacatagaccaaggaggctttgatactgagaagtaaggcaaaatatgacggaattttggaatgatgcagacaccacgggcgatatgagtttgctaatgctttggcctatagagatgaggttgggaatatcaataggagaagagaattagcaaccaggtggtagaaatgggcctagtgagttgtagaaagaataaggagattgaccaggttggaggagaggccttgtgctctcttaggagatttatgagaagttatgagactgaatttctccctaaattatgaggacccctaaggtacttgcctcagtgactgaagagaatgggtggttggctgtagatccaccattcggtgattgattctggaagcatctgtctggtagggagggcgagaagaactattttcagactttactctggtacaagcctcaagcaatttgtcatgactcaggtggttgggaaacaagtgtgctctcaggacagcttgacatgtcactcagcagcctcctggggccaagctgttcttttaaaggaagagttttgtgttgactctgaacttggaagaatccaaaaacagcaagtgacaacagaaggttgagtcatgagtgcataccgcatccaggccaggctttgcttccaagcacgaagtagaccatggcgttgggttgacgttttcacattgtaaccgtaaattctctgtgacccatttccactgcctgtatcattttatagacctgtatagttgcatggaaattaaattggtattcattataaggtgccaccagatgcccaaaggccttctagattgtccaagaaaagcatctatcgagcatccaactccagcatattttattatgtttaaatttctgaaacataagcacttgtgatatatgtgacaaatatagttatcagcattttttcttaatcaggaaactttgttttcaaccatgctggataagagagaacttactgcagttacaactatgcattatttttgaaataatcccagctagcattgatttactgtggtcacaggccctctatgtctgcttcaaattcattctctgtgtcatgcccacaattatcctcctacgaaggaggcattattgttgtctccacttacaggtgagtaaactgaatcacagagaggacaaataatatcttcgaagccatgcagcaaataagcgatgaagactggatcatacatacacatgtgcacacacacacaccattcagaatcatggtggaagatggaatagtatgttggagaaagataaggatttcaagctaacgtctggtaattgacaggctgagcaagttggggaagccacttttaaatcctagaatattggttgcctaatcaataacacagaagcctttactcataggttaattttgaggaatgaatgagataatatgttgaaaagttttgttctataaactaacctccccaacagccatatccagaaatcgaatttttactgggaggtcatgaacataggctcaacctcggaattttctgctctgacttccttttcccaactcgaatgggttgattatgttcctaacccattagtgcttagttgatgatacgtaatcatctgtctgcccaggtaacctggtaactcaattaaccagcagtttgacatggaactttgtggagtgccaggcatggtgatgcagacttggacctgctcagggctctgacagatggacaccagcatccctgaaaataaagatgtcttgtctttgggtctgtgtgtttggttacctagttgcttctctgctctgtggaagtcacattttcctctgtctcttcaacagtccctgcacccggtgggtcagtgccccggggacataccatggcttcacatccttgttttttccagcatctggcatctcaggaagccactgactaattcccttggccccatcccacccctactgccgtgcactcattggcttctagcttttgatgaattcagggaaataggggttcccgtgagcccatgtttttcaagagctcatagtttatgcctggaatgcagatttgcactccagctttctgaaatgagcagaacttcggaaataccctttagtggatcctgtctgaactctaaatgtctccgagtttgctttagagacagaagggagaattcttgaattaacaatgaagctccagtgaaatcctcctatggaatttgaaatgtagccattatgacaaataggcttttaccttttattgtggtaaaatatacatgcataaaatttaccattattgacatttagtccatgcacaatgttgtgcaaccttcaccactgcctacttccacaacattttcatcacccctaaaggaaactctgtacccaataaacagtccctctccattcctccctcctcctggactctggcaaccactcatctgcattttgtctttagagatttgcctattctggatattttcatctaaggcagatcagtttgttcattgaaaattttcaacatgctagacattcacattgcttcaaaatctaaaagtctaaaagggtttcctttcttttacttctcccccatcggcctgggctcccttcccacagatgacttctttgtttgtggaggcatatgtattctagaatatgtgtatcccaatacaaacaaatatgacacacactcttatctcccccttttattacatgaaaggtaacatcctatacacaatattctgtaccttgtttttcagccaccttacaaaatgtcctggaacttctgtccccatcagtacacagagagcttcctcattcctttttaaagccgcatagtagttgtttgaatctagcatgctttatttaactaatcctttcttgatggacatctaggtttgtttccaagtatttgccatcaccagcaaagctgccatgaattatctcacacacatgtcatcttaaaagtgtctcggcagcacaaattcccagaagatgaatgactgggtcagagggcatgtggatttgtagttttgttaatgatcactctgtttctttctgcaggggttgtgccaattcacatgctcactggcggtacacaagagtcccacagcctccaccaaagagtgagttacccaactctgcatttttctcccaatctcagtgtaatcgaatttgaatatctattcctatgtttaagaaagaggatttaaagagttctggttttgtctcctaaaaggaaaaaaaaaatgcatctggaacctccatgttacttgtttacatttaaggataaatgaaaaatgcagtaatttcccgtaatgtccacaaaatcagtgacttgccgaagtccacacacctttccctatctggaaagaagcttctgtggaaggcctctgtttcccaggatacctcacttcccaccgtcccagggacaggctgtgagatcccactcctccacactccccactgttgactccccacagtcagctcccctctgagtgcccagcctgggctccagtagtttatttaaaagcatgacgagccctctaattatggagataaaagctgcctgtgatgcagagcagggcttgggttgaaaggtctcttttttggctctttcccatctcattagagttgcgggggtggctggtcaccccaaggtttaatccttggaggcagtgtgacagcaaatgtggcaagaatcacagctcattgattgttccattaaaaatttctacaggtacctgtaaaagtgcctttcaagttgcttcagtctgaagaatcttattgctcctaaattgaggtcaattaatcccctgaaaatgtgtggcattcacaatttgatgtcatggcctccatgtgaacatctctctctgcatggatggaggaagcgaacagctcttccttcttcctgcctttcccacttcccctaaatctaaagagcaattctctgcctttgcgagcataggctggtgagagcagggagagcaagaccacactgctcagcagccgtgtttaccatctgatcatcatggagggacaactgagtgcacagtgtccttccatccatcattgcaagaccagggaaggaaatttggccctcgggcaggctgtagcccaggaaaaaggctatcctcagaaggccagccgccttctctagtttgcaaacagcacagatttagagcttgcgttccttctcatcccaggaaccacatatgagcacctctccctgccatggttctcacgatgcctggatggtccttatttaagtattgaatcaggagagggcaagaggcttcacccaagacggctgtgaggtggggatgcttgagctgcccgcatctgctggtcaatgtgtcacctccatcctctaacccagagagcatttctcttcatttcctctgcttcttgctccctacattcaacactctgacctcactctgccatctctcaaaagctaaccccagactcctcttctcagtacagggctctggtgaccagggagactgggatgtgatgagcagggccttgggagccagttatagagagttaagtcctggcttggtcatttacaatccctgagtactttaacttttctgaaatgtagtttcttcatctgcaaaatgggctagtaataccaatgtgcaacagcaataggtgaggattgaaggagacatttaggaagtctctggccccatacagagtactcatggcagctgtgaaagtgtgcttcccgggtggaggatgagcccatctactggtcctttggatccactagtgggtttgcttggaggtcacacttaccacagctgctcccaggtggtgactgggccctacagggatgcgaagacaggcccattccagagagatgtgggatttctctgacagacagttgtggctcaaggactctccctgagccttgctagaactttcttggagctgtgctgcagtgtctagacaagcttccttcctttcctcctcctccttccctctgaccttcacagggccagacctgcaccatagcttgagggttctcccaccttcttggccccttccagaccgtgtctcccaagaaatccctcaggtgtctaatcccatcttggtatctgtttctggaagacccaaactacacagcactcaaaccattttagttccatctcctttttgctaaatatatagtttaaaggctgtgtttaaggattacctagaaatcattttagggtataatgacatgttatttatttattttaaaattatgtttgctccacttggtgaaaatttctgtaagtacctctgagatcatggatcctggggcttcactgagcatcaacctttggggaactgcttctaatgctgataaaagtgtcaggatctttccttgttgactgggactggcattttttatgtgagggcaggagaacagcgttagcatctctgcaggtgttgtgctgccccaaaccagcatctttcttcacaggggggctagagagggtggggggccacttcaggccctagaacctttgggtgcatgaatagaagtgccatcagcctctttgcggtctcagaagacagtactcttttgctctatctgattttttttttttaaggaatcttacctccttggtgctaagtggtgacagatactttgacacttacttcttttgccccataaatcagccctgggtcctgggcagcttagaatcatgagaccataaaaatatgaaatgacaaagcatggagtggtcttagagataattaaattgacctgccttacttgatacttgaggaaagaggcctagagtacatcagaagtgaatctacccttgacttcctttttaaaaaatccatccattcatgcattcacctaccagtccattcatccaaccagccatccatctatccatccatccattcctccatccacccatctaaccttccatccatctacccactcatccatccatccatccatccacccaccaaaccacataattcatccacctacccatccatccattcaaccatccatccatccacacaccaaattaccacataattcatccatccacccatttacccacccacctatttacctgtccattaatccatctatccatccacccacctatctacccatccatctatccacccacacatctacaaatccatccatccatccatccatccatccactcatcaatttgccccatcgtccatccatccatccatccatcaatttacataccagaggtagaccctgaaaataaaaagatgaataagatgtggtctctacctcctggggctctcccagtccagcattcccttccattgctttaaagggctcaattcaatcttgtctctgaaatgggccatgtcaccgttcactaagcatcttccagtgccagcctttcagattccatcaacaacacattggctgtgggcatgcaggtcatgagaacaaggtcagcagcatacgcctgcccattgctccccagaggaaggaactccaatgtccagggtctgggggatctgtgcttccagcttggcaggctctcccagcagagagcaaccacttttaaacttctgcttctccctactttccatccttctcccttctcttccttctccacattgtcctggtagcttaccattcccaatcctgctcccctcaagcacgttagctttgaggccatccagagatcgattcatctcatggtcctgtttttcccattgcctttcacatcagagaccttttctctcttcgagcaaaccaatttccttctgtgattactgcttggatagaaaggactctgttgtgtggtgtggggagttcaggaggatggtgggcactgagccattaccaagtttgcacttgttgccttctggccaaggacccagaatgtttattcaaaggagcaatttttaaataagacactgacaccagtatctggtctaagagaagagcaagagagaatagtgggagacctggaggaaaccaggtgttcctccagccagggaagctgtagaatccttgtcgtggactcctttctgtcacctccaccaactgagtgagtagctcagactggaggcccctcaccaagcctgtgggaccaagtgtcacctgaaggcaggggttctgcataacaggccaccaggctaccagctgagcaatcttggactagccacaaaatctctgattgtcaaggcctccgcctgcataatagatctattaacaaaaatatctgcgatggccagtgtttggatatattagcacacaggaagatagtgctccaaaagtgcttggtaacaagagcctggtgcatattacttgtaaaagtaaggtttagcccaacttggtgtgttctcatgccgccacaaatgccaccacttttgcacactcatgtacccccaggtactgctataccgggaccacccccaagacatactacatgcctgactgtggtggtctttgagggaaaagttgttttcagagcagtggctcttaacctcttgaaaggttctcctccaaaacatgcacacatgctggaacacacatggaccccctcactgaggtgggagaattgcttgagcccaggaggtcaaggctgcattgagctatgatctcgccactgcactccagccgggcaacagagcaagacactatttctaaaaaatacaaatagaaataagtatgaaaaaaagagggaaaacccaaggatgaatggatggattgtgtgccaggcatttaatgcattctatcttgtgttcttcactcaaacattctaaggactcttgaccccactttgcagatgggaagtcagaatttgtctgaaggtccatggctggtgagcatctaaacaaagatacaaattcaggtctgtggggtgctcagctttccactgtgcctgtcactcctgcttctccctttgtatctgatcagaccaagttctacgcagtaggctcaacacacacccaggagcaccggctaccccaggagaggagtcgccaggaggggagagctgtttccaccttcacctgtttctcgttcacctgcttcttgccttgcaagtctccagacaggcagacttcagaggggacctcctggcctatcctctagggtatcttgcttctgcctgctgtcatcttctaatacccaaaaatgtgtcgcatcctcccaaagctcgcgctctccctgcaaaccctgggccaagcctattattattgtatatatttcactaaatcaatcttttaaaattctacttaacataggtgcccagcctaatggtggccatcttttagaggaggaaataaatgttcagagaagtcaagttccttgtgcaagcgggattcgatacaggggacacaaccaagagacctctgagtccctccacacatccatgctgtgtgttgacttgcttacaagagtcccctgtgtcagaggctgcctggcagtggggacatgagcctttcccttagagggaaacatgagattgggcaacaagggtagtcctcaaggttctacctcgagactccaggacgctggacattggaaatgaggccacaccctggaggagcattgtcggctaaagccaaacaccattagcgtctgaaggggatgtgggacccatctaaggtatcacatccctgatcacccaccatggggtctgcagctggagagggtccccccaggaggggctggagcggggagttctctgccctgggaggcaggtctcctggcccttcactggagtgatctcttcttttctgatgtcaaatcctgatctaaagggaggcatcttccttcttatggcatggccatgtctcctgtgttccttcctcaagccaaatccttttccacgatgccttcccctctgagccctgtataacccaatagtgcaaatattcccacatcccctacccacaacaggggtgagcacattgcaaatgttccgccggcgaatcagcacctgcctggaggtgttcttggtgtctgcgtcctgcctccagtacagaggacctcaaatccatgatacttcacctggtgctccccaggaaagcctggcagaggacctgacgattcccagcaagaccaagcactgctgtccagggtcagccacggtcacttctctgcagctgtcatccgggcacaatctccaaatatttctagccattcagacgttcactataatcagaattaacgcatgtagaaccaaagagccagacacatgggttcaaacctgccccaccatttacagtgagagcttagtgagtcacttaacctgtgcctcagttttctcacctgtaaaaagaacataacagtaacaataccattgagctgctatgcagtggatgagcttctatatgaaaggtgagtgaaaagtgtctggatgtggtggtgtcaacctttccctggggtggtggtggctgatctgtggcaccccacatgacaatgtctttgccatggcagtagatgctgttaaatcaggccctgggtttgtcttggcttgacttgtttccattttcaattgaaaattaaatgtggatagacttcagcctgactcggtctgctccctggaccttggccagtgagttctgagtaactgcagacagggtgtggtcaccgggatttggttattggatttttttccccctgtggttttgggcaggttgctccatgacgggcagctgtatcgtcttagaaccggactttccgggagagcctttgggtcactctgggcgtcagctggaaagggctgctcttggagcaagctcactggcccacaggaggagctgccttcttgaactgtcaccctgaagccaaccaaagtctgggcaacgccagctccagtgactgccgctccatctcctaggcaatttgcatcgctgtttctgtttgttaggccttgaccattcctttgttgtcatcctgcgcttccctggccataggccttttcccagccccaccacggcatgcccacctgtgcttggggaggggcggaggaaggagccccagccagccatgtccctgtttcgtgctccagtgaccactgctatgaggactttcccactggctcaggctcagttagtcgagctggtgtgccccgctcttagctgttccccaactctcctagagtgtgctaattctgacccagctctcccaggtggaggatgcttttcaaacatgtccttgggaacctctgcagacccattcccagcccattctccatgattccaggcctggccaggttgaaaacttctgtaaattaaaactcaaataaagagagtatagcttgggcataccttttgcacatgcatatatatgtatgtgtgtgcatgtgtgtgtgtgcatgtatgtgtgtgcatgtatgtgtgtgcatgtgttgggattttttattttttaaatttatatttattaaaaaaattttttttgaaacaaggtcttcttctgtctcccaggctgggctgcagtggtgtgattatggctgactgcagcctcaaactcctgggatcaagcaaccctcccacctcagcctcccagagcactgggattacaggtttgagccactgcacctggcctatttaaaaagtttgtctagagcaaaaagtccctagacctgccagtccagggcactaaatcacaagaacaccaaggccaaacaggcttgaagtctccaggctcctcactggcaaactctacttcctgatcccttagtgggttgaggtgccaacagccccctggggaggagggggttgcattatggccgtggagagactctgagccttatcaacggtgtggggatgacacccttttcggagcactttgtgaggctttgtgccatgctgggcgcttggcgtcagagacaaatagaatcaataactgtgcaaaaaaagttgccagataatttatcccattggcaccgagcctagaattataatcagatcttgacttcttcaaagccttcttgctttggattttccaaatcgaaaataaatattgggggcaattacctttccttagttctctgatgtatgaaggggagttttcatctattaatttaagaaccctctcatttcattcggaaggtattagcccatggaacttgttaacttaatatcaacacagtctgtctaggttttgactgaaaagagaaaggggttgttatgctctaggttaatattttcctctctttaagaagtcttgggtatgccagacacttctcggacaaaaacagctgttttcttcccattgctgaacgcattgtttgtgcgagttcacttacttgctatactcagaatatcctccaggagtcagcaaatcccaacctctggacgtggctcagggccgccctgcccattgctgagctgatttggaatttgggcctgagagaggaagtgattattggatgacaggctgcctcctagggggcttctctgggcttgccatgaaagcacttccggaggaaaagcagagctccatcagtctcttttggagagctgtgaacgtgaccagacctattaattacttaactgaggtgctgaactttgaaaatgaaagttccggtggggagttctgtcctttccagcctggggagctctgtcagggctctcctgagcgtctctttcagcttatcaagctcgctcggggaccgtctctggtaagtacaggcaacccctccagccaacccctccaccctgtgggccggggaagtgtctcatcgttgaatccacttgcaggcacttccttgatctcaagccccaccacgctgcccccagagtcccagcgagtggctcagtcacactggtgcgtgcctctcacccgctctgacctcgtcatggggtccccgaggtgctggttcatgcaaggctctgtgcctaaccaagctaaacacggtggggctgggagcagaggctcacacctgtaatcccagcactttgggaggccaaggcaggtggatcacctgaggtcaggagtttgagaccagcctgaccaacatggtaaaaccccgactctactgaaaatacaaaaattagccaggcgtgacatcatgcgcctgtaatcccagctactcgggaggctgaggcaggagaatcgcttgaacctgggaggcggatgttgtggtgagccaaggtcgtgccactgtactccagcctgggtgacagagggagactccatctcaaaaataaataaataaacaaactggtacagtgccctagtggctttgtggctctggctgggggaggagggtgggttgcataactgagcagcacctccaagcacgataccaacactgcccagggcctggcagagtctacagctggtccttatccatgaaactgggggtgaggggacggggactggcggggggacaaatcacctgcacaagtggaacaaagatacaggagataatgacagcaaatggaacgtagagttgatgcgttcattgacaaagaatttcacaccctgcattatctcacttgagccccatgaagagcctgtgaggtggctagggatgtggaaggagtagataggagaggcacagaacaggggaaggaaggagtggggctgggagtgaggaccaggaaggcagagctggcccctggacaggaagaaagcccaactgcctccctccctcccatctgccctcctgcctgcccttttccaataagatggaaatgctgaaggggttaaaaagacagcattctaaaagctgagatcctaaaattgtgacctcccctgtgatcttagccttcgtgtcaacagcattgaaaatgaaccttggtcgggcacggtggctcacgcctgtgatcccagcactttgggaggccgaggcgagtggatcacctgaggtcaggagttcaaggccagcctggccaacatggtgaaactctgtctctacttaaaaaaaaaaaaaattgccgggcatggtggtggatacctgtaatcccagctacttgggaggctgaggcaggataattccttgaacccaggaggcagaggttgcagtgagctaagattgtgccactgcactccagcctgggcaacaagagtgaaactctgtctcaaaaaaaaaaaaaaaggcaaaaagaaaatgaacccctgggaaagtaggccttgaccactctgctgctcttatggagttcattcttggagatgtcgtgaatagatctcctttgcatccagatggaagagcaacaggaacattattaagaaactaaaaattctagattcattggaaaaggctttgagagagaagggacagggaaacccctaattccacctccctgaaaacagtgtgttttcctctcctacaccagggccgtgtgtctttctgtctacgtggcccagccacatttgtagcccgtggcctgatggagctctgatgagtcagtttcatgtcatttttttttttttttttcagagagagagtctcactctgtcacccaggctggagtgcagtggcatgatctcggctcactgcaacctccgcctcctgggttcaagtgattctcctgccacagccccttgagtagttgacgttacaggcacccaccaccgcacccagatacttttcgtatttttagtggagacgctgtttcaccatgttggccagttggtctcgaactcctgacctcaagtgatctgcctgccttggcctccctatgtgctgggttataggcgtaagccactgtgccctgcttcatgtcatttttaaagagcccacacaactcctgtagctgcattacgacaacctcaacggcaagacctcgacgtgatattactccacgtgaaagtctaaaaggcgctgagcacagtgctctgccaatggtgtgtcttccagcctcgcttgctgagagaacagatgtgccggggaagaaatggacaaagctgggaaaggagtctaacttcttcaaagcggttgggcaccggtgaggctcttttggttacaaaccacagaaatggattctggtttatcagtttaatctcggtgtaactaaaagtgggaagtactggaaggagacgcatttcatgggctcagaggtgaccttggggcactgagttggcccttctgtggccaggtgtccctctctcggggacctgccttcccatgccccagtctcaactcttggtgtctgtctaatctcaaactcccaagagactggattggattagatcagtgtggtgtagcaagaggcactgtgtgtgtgtgtgtgtgtgtgtgtgtgtgtgtgtgtgtgtggtgtcattagggagatctcagagaacaaccaccttggccaacttgtctatctcacgccagacgttttcacccatcgttctgtccaaccctacataatcctgccagggggctatcagttttttgtttatgttgaacgctaaactcagcaggaaagaacactgctttctgggattttcttcatttaaacctctattgcctatgagaacagtgtattttctttaagggctaccaggttttctattaatagaaaattaaaaaaatagtgagaagtaccaagaacaaaattaacatcacccatcatccaccattcagacagaaaaatggtcccctttgactgatgttcatcagctatataaatctctacacacacacatatacacccatacctactttgaagtaaaaattatgaagagcacattgttttgtgacctttctcttcacgtgccgtgttctccattctgttaaatattcacttccatctttttaaatgggtgcttaataaactttgactcatacatgttgcaaaatttgtttaatcagccctccattgtcgcttatttaggtgcttcaaattttttgctgttattagcactgaagtgataatcattctggaaaaagtatctttatacatctgttggattctttccccaggataaaattctacaagtgaaaatgctgggttaaaggatgcccatgaaaacatttttagataagcagaatccaatgctcttctgaaacattgtaccatgtgtcttctccacccaagggaacactcagtatcacttaattacaaaatatttttatagtttatatgagaaaaatgacatctcattactttttttttttgagacgaagtctcgctctgtcacccaggctggagtgcagtggtgcgatcttggctcactgcaacctctccttcctgggttcgagtgattctcctgccacagcctcccaagtaactgggattacaggcatgcgccaccatgcctggctaatttttgtatttttagtacagacggggtttcgcaatgttggcctggctcatctcgaactcctgatctaaggtgatccgccccccctcggcctcccagagtgctaggattacaggcgtgagccactgtgcctggccgacatctcattactatttaatttttttttaattttaccttttgtgaagatacaacttacagaaaatgcactcatgttaattgcacaactcaatgaatttttgtgtatagagatgcccatgtaaccactacccagatcaaggtacaaaacattcccaccactccagaaggctctctgtgccctctcccagctaatgtcccccgatcaaaagtaatctctattctaggctttttcaccttggaacagtcttgcctttttctgaccctcatataagtggaaatgtacaatatctgctgttttgtgtctggcttcttttgccctgtgtgatgtctgtgagattcacctgtgttggtgtgtattggtatttttctcattctcatcgctgggtatacctcactgcatggataaaccattcctctgtggaaagatattttggttgtctcagtgtggggctattatgcacattcttgtaatgtcatttggtagacatgaacacccacatccaaggaatatgtgcctaggagaggaggggttgagtcagattgtatatttagttttcgtagatacttccaaatcttttgtctaagtggttgtatcagtttacactcccaccagaagtgcatgtgagttccagttgctctatatccttgccaacacgttgtattggtagtcctttaaatttcacatattctgtttggttttgtgtgtgtgtgttcttattttgtatttttatgattgcaggtcaggttgatcatttttgttccatgtgcattgactatttgggtttcttcttttttgacttgcttgtttcagaagctttctatccttcttttgtattggggtgattgtatttctcattgattttaggagttatttgtctattattacgacacttggttatgtgtgatgccaatatatatgtgcttttgtctagagaaaacaatgctgaatgctcacaagtactgaagccttcctacaggtgaagtattacactaagggttttatataaaatctcattgatccttatactttacggaagaaactaagacacggagggggtaaagaacctggctaacgtcacactgttagtagttgctgggatgggattctcacccacaaagttggacaccagacctcaaactttcagccattatggtcaatcatcttgtgaatttttgactgggccacttattgtcaaggctgctggcgtgaattgtggagtcttcttttacaattatttctggagtgatgatttcattctgttacgcagctgacttctgtttaaaggagacattttgtgtgctctttgtgattttattggaagagaacacagtgtgactgagatttctgatgccaccgggaaacatgcagcagagacccctgggtggtcacccaccagtcctcagctgggctcatggctgggctgtgtctccagccttccctcatcacctccctgctggtcccctcagccttcaccagactgcgctgtgtgctgtctcctgcccatggctcaggtctgggaggtttctgtagctcagccctataagtcagagctaaattgttactggagacaagggtctagttaattcttttagtattatcctcctcccatgcttcagtcacctgtactcccacttttgaaatatgatctctgaactaatagtaatagctaacactgctctgtttattatcaatactttacacacagcatgatatggtttggctgtatccccatccacatctcatcttgaattgtagctctcataattcccttgtgttgtgggatggagccagtgggagataattgaatcatgggggcaatttcacccatactgttctcatggtagtgaatacgtctcatgagatctgatggctttgtaaggggaaaccccttccactgggctctctttctcttctcctgtctgccgccatgtgagacatgcctttcaccttccaccatgattgtgacttctttcttttgtaaattgcccagtctcgggtatgtctttatcagcagcgtgaaaatggaccaatatgtaacacatataagtaggtcatttaattgtcaaaacaaccttaggagggagaaagataaaatatcttgtccaaggccccacagctagggatggagccagggttcaaacccagccagactggctcctgacttttcaccaggctgtgtttccctgagagggagtgcgaggccagcagcccaggcccatgtggtggtcctgcagccgtggctacaatagcaagttctcagggttttctaaggcattgcatcttttttccttttattgggagaaggggttgtgattgtgtgagcctatttcccccttttattctcatcagtgtctcacacttcacttgcaataagtgaatattcccattggatgagtttcccaacactgccataacaaatcaccattaactgggaggcttaaaacaacagaaatgtattgtctcacagttctggaggccagaagtccaaaaccaaggcctcaacagcattggtccctttggcggctctgagggagaatacagtccatgtttgtttcccggcctctagtggtggttggcagcccccagtgttgcttggcttagtgacccatccctccagtctttgcctccatcttcacattgacttctcactgtgtctcaaatatccctcttctttctcatacaagaacaccagtccctggatttaagatccacccttagtccaggatgatctcacacctagatccttaacttaattatgaatgcaaagaccgtaggtctaaataaggccacatgcacaggcatggagggcaggacttgtacataactctggaggacatgattcatccactgcacccctcatctctggatttacatccagaagcagggtacccacttgccaaggtgcaaactaggtgcaagctggcccacctgacccttcctcaaggcacaaaggacaccttcgtgtttcacgctttcggggactgagaagcaggaagcactcccttgccacccccatcctcccgccgccttgttttccttttcgttttccctgcgacatctcctaccacatccggcactggattctcctctgtgcgttggtgttggtgtgtcagcttctttataaactgcaatcagttactcctgccaggtgagccttatgaagagacagcagcaatttgagcaaacgcttgtctaatttgttgatatcatttagcaagatgaaatgactggaacaaggaatatgtttctgaatgtacatgctctgaatgaagatctctagatggttgggaataagttaccacacacctggaaaaaataatctgtgttttctttttgcctgtcatgaatgaatgaagaggctagaataagtctcccacatggtctccttcatcagatccaaatttgggtttttattctttgcagttattccaaactctgaatacaaatgtcttctgtaggtcaacaagtatgatatgaaccacaggtgttatgcttattggtgtacggtagtatgaaattaaaacagttctctttagaatgcagtatttaaaattgcgcagtctttaaattaaaagttcaaaaatccaagaagaaattgggaggagacacagaacagagggaggttaggaaaaataaaatttttggcaacacacacacacacacacacactctctctctctctctctctctctctctctctctctctctctctctctctctctctctctcctggcacctgggaattgcaggggctgacacctggagctgagaggtgggctgccgaactccccggcaatggttgaatccttgtctctgattctacagacactgtggggcttaccttctttgcaaggaggctggtggccactcatcctgttcctgctgtcaccacccaaatttaaggcccccaccacggtcccaccactcttctaattgcctcctccttgggccacttcctgcccaaccctctcccctgaaaccaatcttccaaatcacttctagattcgtcttaaaacatccatgtcaagacgtcactcctcaaaacctctgaaaaacctgctacagtaaagaatcagtatgacccaccacatacacaagtatgtgcaaatatacatgcttacatacatacatgtagatatatatgtatatgtgtacacacacacaaacaagcaagattcatggaagaattcttgttcactactcctatgtgacattccttctgctgtttcctgttccactccgcgccattcgattcgattccacttgattggaattcatgctgcaggtgccccactaccttcatctcaaaacccctgaatgggttgtacccacactttgacacaggcaaagctggaaatctgaagcctggttctcaaagttcccaccaatgtgccccacctcctactgctgcccccaccatctctccagcttcttttggaggtggcgctgcccaactctcagtggtgcctaaagcccagggcccttttctggctataccttttttgagtcctttctgacctcaccctgcttgtccttctgggtcagttcaatccctgcctccttcctgaagagtccttgaccgagattcccctttctttttttctgcctcacatatcaagtatctgattaggaggctggactctgctttcaaaatgcttaattcatgaacaacccacacacctaggtttgtttccaggttcagatcttcaggggtatgcgtggcctggagagggccttcatccacacacgcttaaagcttcagcaagttcctgatgcccagaacaaccaacccttcccgccctgcggcccccaccctcgggataatgggaatgttttcgtagcaagttggaacgagaaatcaattttcctgctgaggtaaccagcactacataggtaggtggacctgaaaaggtgctttgagagccatgctttaaacacatttgatgatgttggcttttacgagctagccaagcaacctgcccctcttggaggcatttttatggggcaaggtattacattgtgtataagtactaagccactggcctacaaacaacttttggggtgctgtctgtcctctggttgaacgcctcctgtgctgcctgtctcgccacctctccacatgggtgtgtcttatctccacaactcaatggtttcccacttgctgcagggcttagcgcggcgccttatgccggcgatacctccctaaccaggctggtgacgtcttgtcctccccatctctggctgcctagcgtcctcggctctgtcttcatcgtggtttgtcctggagtcaatgggtccctgcctgttgcttggaaacccttaggaatacttaccaggaaaaggagaagaaggaaggtgatgaggaaagggaaatagacaagagaaaaaaggaagaaggataggaaaggggaagagaaaacgggaactagataaggataaaggaagagaaatgaagagagaagaaatgaagaaagacacgaaaaggaggagaaaaaaggagaacaaaaagggggaaagatgagtataggaaaaataaaaagaggagaaaacaggagggaaaaaggaaaataaagggggaaaaacccacatttctactactctgaccagaagctatttcccagtagaaaagggcagggaagccagaccaggtgaaggtgtgcgagtgagaactcagtttctggattcccagcctggacaaaaagggaccgaggagagaggctgggaaggcatatctggggggcaggaagccgcacccagtgaacagagcccacagctgcagggagcactgggctggggtccccgtttataggcctgagctgagcatctccctctgagagctgtagtaagttgttggtggtctgcagggctgcgaatgtaaggtaattttagtcacttagctatatttattgctttcccaaatccaaaagagccttgatctttttccttagagctggagcctccagaactacaagtctttgactctgagacaggatagaaatgacgtttctgactctggctgtgtgttagtaccacacaaaggtcccagaaatcctggtggccagaccacagcccagaccatgtaaatcagaatctttgggggcgccaccaggcatttgtatcttgtgaagctcttcagggtattgtgtgcagccaaagtcaaggtctgattctttagtggtacatagagagcagatcctaggaccctactgggacatccgggggccctgccttttataggttgcatggtgggaagcagagatggggaaaacaaatcgtgtgggttgatttgaagcctaatgaaaaagaaatactgatttgggtcttatatggtgtaccaagtattagttaagactgttaaaatgtttgtgataaaataaagacacgtttggggagcatttctaacaagagccctactcatgtcaacacttgtaggctgggtacatggctcacacctataatcccagcactttgggaggcagagataagatgaggatcgcttgagcgcagggattcaagagcagccttgaaaacatagcaagaccccctgtctttacaaaaaataaaaattagccaggtgtggtagtgcctatagtcccagctactcaggaggctgaggctgaaagattgcttgagcccaggagttcaaggctacagtgagccatgatcgtgcccctgcattccagactgggtgacagaatgagaccctgtctctaaaaaaccacttgtggatccatgattgtcttcagccttcatcctgctgcttcccataagctgtgggcagttcccaacactgcacaaggatttggtgttgatggaaccaaggatgataattctgtcaacaggcagcacccacgaagggagaagtcccaacgaggttcaaagctggattggcacctaccaagtgactcaatagcatgatgcctccactgccttcctgtcctcccgtgttcaggggtcatactgtctcctggcttctctgttctgtgtggttattgggagataaaatgatgaaagtaattttccagagaatgatgctgtgagcacacaggtgtttgctgaatgaatgaatgaacaaatgtgtgaatgtaacttgtgttagcgttaccctacactgtcgtctctgcccagaggtgacaacagcaaaataattcagtccacaggctgttcttttttttagtgtaattgtcaaaaaaaagtccagctaaaaaaattctattttgcttgtataaataaacagaaaccttatacccctgagccaagtggaaaattttctcagtaaaaatttgtagggacagagagtttttaaatttataaaggaatttaataatttttccaaaattactgagaatttcaaatgcctcaccacaaaaaaatgatgagtaagtgaggtggtagatatgttaattctcttgatttaatcattcctcattgtatacatatatcaaaacattgcactagactccataaatatatattatttttgtcaattacaagtaataattagaaaaaacgataatttcttatgtacccacctgtgatataactataaagtcattaatttggattctattaatttggcatttgcagtaacatatgcctgtccaaccaattcttctcggaaaaaaatgttcacagtaattctttccctgatggagagaatactgagtccaaagtttagaagcttagggtccaatcccagacaattaattagctacatgaggttggaaaagtcacagcctctgtgaatctcttctgtaaaactccagtttgtgaagagcataaagttaataaaaggactccgtgaactgtgaagtgctttgtaatgtatttagagtctttcatataacctaaatcaaatcgtttattagcagctttcttcaccccaagatacatgcgactccctcacttggtttcaacttctgggccgagcaattgttcatgaatatgcttatcatcagactgtacgaaatacagcacctttctttatcacataaacccttaaagctagaaagccccagggacaatttttttttttttgtgagacggagtctcactctgtcacccaggctggagtgcactggcgcaatctcggctcactgcaagctccgcctcccgggttcacgtcattctcctgcctcagcctcccaagtagctgggactacaggtgcccgccaccacgcccagctaattttttgtattttagtagagatggggtttcaccatgttagccaggatggtctcaatctcctgacctcgtgatccgcctgccttggcctcccaaagtgctgggattacaggcgtgagccagcgcgcccggccagggacggtgtttttaaaaatgtgtctaattatcaaaattaccaagaagatatacacactcacaggtctgtgtgtgtatgtctaggtgtgtatatatgctggtatgcatgtacacatctatatgtgtatatacgtgtatgtatgtaaagatatacaacatggatatataatatatacaatacacatatattatacatgagcatattgcacatatacatgagtgtataatatatacaatacacatgtatattatacatgacaataatgtatacattatagatatacattattacattgtgcatatattatgcatgagtatatatgtatatatgcatgcatatataattatgtatattatatgtatatgcgtatgtgtgtatatctatgtatccctacctcctgattcactagattgtggatggggctcaggaatctgggtctttaaagttccacatgtgattctgattaccagcagtttaggggaccaccctcctcactttttactcctgaagaaacaggctcagagagctagtggcatggctagggtcagcagccggttagaggagaagctggaaatggagcccagccctcccaatcctggctcagagcaggttatcataaaccatgctgcccattgtccacactaacctactcagaactgagctctaaaattcttgtttggcagctagttagctagtcagactagattcctctatcattgtcccacgtaaccccttaagggatcaggcagagcaactgctgcctgcagagggccgtgagtcctgccaaggtggcctctggagccctgatgcatcacctgtaggcagcatccaagtgcccagacctctggggcctgctccgggcttcctggaggcagatgggcatcatcgtagcaggtgtctttctccttggtgtatgagctttccacggagttgttatgtctaaatcagattccaacattcaagagcctgtctttgggaaggcaatggaaggtcttaagcagaggaataataaccaaatatacctgacccaggttgtctggtccatcctcaagtgggaaaccaaaatggaggcagggagatctggggtggggggcgagggggctgtctcaatgtcctggcaataccctgcttcaatatcctctgtcgagggcaaggatcttcttacggtaggctgtgggcccaatctggccggctgctgggttttgtctggcccattaagtaggaatggtgaacactctcgattgatttgatgagagaatactacctctgagccccaatgaagtgagattttatcccctctaaaaaaagaattcatttttttctcattagttgaactgtatttttttaatatccttgatttttaataatattgtcatattttaattttcattaataaaaaagtatggaaatgtgctttcactctttttatggaagtaactgctgcagggcatcgtggctcatgcgtgtaatcccagcactctgggaggccgaggcaggtggatcacctaatatcaggagttcaagaccagcctggccaacatggtgaaaccctgtctctactaaaaatacaaaaattagctgggtgtgatggtaggcacctgtaatctcagctactcgggaggctgaggcaggagaatcacttgaacccgggcagggaagattgcagtgagctgagattgcaccgttgcactccagcctaggtgacagagtgaggatctgtctcaaaaaaaaaaaataataataagtaactgcatagtaggtttgattttgcctcttgccctacaacacctgaagtatgcactatctggctcttcaccaaaaagggctactgagctctccctggtctaggtgttggtggagaaaatggatgggttcggatgtattttggagtgagagccagtaggactttaattttaatgctggcagaacatagactatgctgcagggtgggacagagtcacttgatccctaagacaagtctaagactatgaggggccatggtccaccaccgtcatagcaggtgtctttcttcttggtgtatgagctttccaaggaagtgttatgtctaaatcagattccaacattcaagggcccaactgtatatgcgaaggcaatggaaggtcttatgcagaggaataacaacaaaatatacctgacccaggttgtccggtgccaggtggaggatggaccacctgggaaccagaatggtggtgatgaggcccccaacatggcctagagcagccctccccatggtcccctctgggttgagtctcgggctcctcccatgccccagctgagcccataggtctcctgtgtaccagcagcctgttgaccagaataagcagtgcctggcacaggccctggaggcttcatgttatagcccataaacaacgccgtatttattgacggatgactatcattgtcaagtttccagccaccaccccaccttccataggaccagcaggctggctcctggctggcaccaagagtgagcggcttgggcatttaatcaggttcaggtaacaggtaaggactggttccccagctagggaaaaacacagtgaatattttggattgagccatgtgtgccgcatcttgctggagcttgcaggccccttggaggctctcagacggctcttaattaattgctggagccaagtggggcaatcttgtgagcgctgttgcttttgctcatctgatccagccatgctcaggggagggtgaggagctggccttggatttaggggatgaatggggtgggctgggatatgggaggagctcagtggcctggccaagatggttgggacaaagcttggaatagccaacctgtttgtcaagcaaatggacaggccctttcttccaggcagagaaagaccttgcttcagctccctggcttggggaggagagacccagattcgaatcctagctctactactaactaactctgggaccatggggcaattagctgctttaagcttcactgtctcatctgtaaaatgcatgcagtgatactacctcgaaggattgtggtgggaatcaaatgagatgagggtaatgccatgcaccatagtccctgcaaggccactgggtccctgtaaggccactgatcagtggggcatgccaacactagaggcagtgctaaccctaggaggcggggacagcagaagagatctcaggtgggcccatgtccctaaggggagaacgagccctgggcaccagggacatcatgcagtgaagatgctggaggtgggaatggggtttcaagtgccagggaccatctccttaactcctctgcactcatgcatgcagctcctgcaaggcttggcagagctcgggctgaagaggaaaggctcctgcctacccagccataggtccccagtggatgcaaagggaacttttccttggtcctggtcctcagtggaacccgttttgtttcgattgtccctgacctggcctgtgctctcgctgcaccatcctgtggaacacagacacctggagagtcagagctggctggatctttggaagggcacagtcacagctgcacccgccactccttcccatcccaggctcgatacttcagtaatccttgctgcctgagcttcccttatgggtcccaggtcacaccttctttcctcctattctgtttgctgagataccttctcttcaaatccttctcctatagagaggtttccatgagccgtgggatgggatgggtgtggccctcttctgggatccagagctccatggagagccctctgacttggttcctgactccttctgcagaccttgtctccatcttgcttccctcctccatcagtcctctaggccttgaggacaggcactgagtcttactgcagtgttgaggctccaagatggcagtgatctcccaataaatatttgctaacctcagctgatttctttactttatgatgtaagaattgaagctacaagagggtctgtgacctgcctaaagtcatatgcaaattaaccagatcttggctccagtagtctactttgactcgagtgctgtttcccttaaatcatgcagcttgtcaggtcaggtcaagcatagcctggatctcaccacattcttacgggattgaaggatgtaatattaatgactcagtaggcttggaatcagccaatcagcaagtgctccttgaaccccttgatatggaaggtacaggtagagaaggtagtaatttttcacaagtctcaaactcagctatgtagaaatatagatttggttttcttcccttatttttaatagattatacaatcatattacataaaagcaaaaccaatacaaaaaagctacaactttttacgtcttatttatattttcttagattttatgaatctttgaaaaatataaccaaagtgaatatatgttcttaattttccctttttgcataaagcctattgcatacaccattttgcaccttgatttctttgtttcctttccatacttttacgtagagagcttctttactgttttatagctgtagaatattccattattgatttaacctgcctcctattgggggacaattggttgttttcaatctttccttattataaacaaaactgcagtgaataaccacagccgataggaaggctgataggaaaaatttccagaaaagcaatcactaaggtagagggcaaatgcttttgtaagttttatagatgttttcaaatttccctctgcaaggctgtgataatttaggcctgcattggccctggtgagagtcagcctaccagccacagccccaccagccacagccccaccagcagtgtcaactcagtttccattcagagtcctccttccacctagtggtagaaacaatcttaatgaatttagggtaaatgcattcatatacactggatttttcttggatagtttaggacttagctcagtgagctcaggagtttctgtctttcctttcttcccagaaaagcagctgcctaaaccacagcatctggtgtcaacattctctgccctctttggctttggccaagatgcctgtggtcccaacatggcagtcagcacatggctgtctgtgttttactcttctccttcctcctcctcctccttctttttcttcatcttttggatcgcaggtacacagaattggattaatcataaactttgggtcatgccaaactctcaccatggcccacttctatttagttaattatttataataatgattaaaataattagttatgttatgagatgcctgttgttaaagatgaacaaagccagatactagctaaagtggcgaggacagattttaatcaggaataactattgcaatggggagaagagttcaatgtgacttgaacttggatttgtacagaggtaactgcacattttaaagggagaatgagggagcaggcaggggcaagtgggggctcagcagaatcaggaaagtgaaaaattacacagagttcaccagcaaaaatgtgactaggccagctgtgtctgctggctgacaattatcaaagttaggattctctcctcccatggagactgggaggcagaagccctgtcctcaggttttggctggaacaaacagtagatttttttgctagccttgagttttctcatgcaggcactttgaggagggtagggccatcctagggatgtggccttgggctgttagaaaagacattagcgtttgctcaagtctttattgcaaggctgaggcctagtggagaggagggccctgagaaggctggctaaagttccatcagagagagtctttgtcatggagaccctactgaggtctccagtcatcagcccccacctctgattccttcctatcctgaccgtgaggtcccaggcacacccctctcagggagagaggacaagttctggtgctctctgaggctctctggtactatcttggccatctcttcttagccctgctgccttttctactcaactgcttttgggggtgggaagtaggggagcaattctttgagggcccaggctggggaaggagtgataggaattggtgtgctggcaaatgtctcccaattggctctgatagcaaggggagaggtgtgcagaaaggcctgaatctatagcacttgctgatttcagggacatgaaaactcccattaaggtcaatttcaggctaccagcctcaagcagttcacaaaattcctgaaaatttaacaattggctgccagcatgggccagctccaagcttacctgtggggaaaaatttgtctagtctctagggaaagggtcacggtcatctagttcttgtgtgtgctcttttctaccaagtgtccttgaccagggcttgatattctttgggagttcaaaaacctcctcttgcaaattaaaaaccttgaccctgatgtgacacccagaggcctgacttggaacaccaaaggcataacttttactctgatctctctctctctttttttcttttagagacacggtcttgccctgttacctaggctggagtgcagtgctgtaatcatagctcaagtgatcctcccaccttagtcttctgagtagctagagtcctggctaaaaataaaatataaataaataaataaataaataaatacattaaaaaaataaaattagccaggcacatgccaccacacctggctaattttagttttaattttttttttttttttttttttgtagagatgggggtctctgtatgttgcccaggctgatctcgaacttttggcctcaagtgatcctcctgtctcagccttccaaagcattgggattacaggagtgagccactgcacctggccctgatctctgtattctttgtagcccctctcagtggttagcatataccactgtagcaataaaggaagagagttgtggggagaataaggaagtgtagggaagagagtacctccactcgaaaaggaattttaatctgctttgcttctgttgtttatgggtggcatatcactgatgccccataaagatttgtagaattaatatgtatctaaaaatcttatcttgctactcaaagaagtggaagccatagctcttgccctcatggagcttacagttggtatacgatatagaatgaatgatgtaataaaaggcaagtgccaaattatggcccagacagtgagtcttggtgattgtctgaaggatgcagaggctgccatgggccagcagtgctttgtggagaagatgggaattgtactaagccttgaaggttgctgcttctggaataagctcaaggacaactaattgaaaacacataattcagctttgacagcatgtcatgggtgtctcacagaaagccaacataattcttcctgcttggtcaagagacatatatgtacagtgtcaccaagaagcaagcttgatgggtgaactcctaagacgttagctcccccaagcgatttatggcccaagtttgagaacagccacattgaatcatcaatcagtgagtagtgatgtgagacctgcaagtgtgtgaggctaacagtccctattctctaagagctaccagtctgatcaggaagatcctgacaggctcagtggacatatacatgagcaaccccagagaaattcagcttgtctgttgtctatctctgcatggatcagagacttacttagggaaagaaaatatgtggggagattatgatgaagacctcccaaaatgtcccgcatggacatcctagcatcatatggccagaactcagtccaccaccttccgcctcacagatgctcgaacttttgtgttcttcatctcaggacctgatgacatcatctacctgcaagttggaaatttagcagtagccctagctcactgcatggaatgtaataggcactcaatccatatttcttttcactcacttattcatttactcattcattaatgtattcactaaacaaagaacctactctgtagggaggtggtatagaatatgggccaagaacatgcgttctggagagagattacttcagttggagtcatggctctgccacttactagctgtgcaattatgaacaagctacttttctaaggctcggctgctctatgtgtaatatgaaaataataatatatctcttggccaggtgtgattgctcacatcttcaatcactgcattttgggaggctgaggtaggcagctctcttgagcccaggagtttgagaccagcttgggcaacatagtgagaccctgtctctaaaaagaatatatgtatacacatatatacccatacatattggtgactgtctgaaggatggagaggctgccatgtatgggtatatatgtgtatatatgtgtgtctatatatagacatatattgttttatatgtctataaatattttaaagaggttatttcaaagatcatttaaataagataatccatgccaagtgcttcataaagagccaagcacagggttagcacttaataggcttgtcctttatgaggattgccagcagccaccattactgttactgctgttgtcacttagcaggagtatggctaaatgcagccctgctcttgcaccagagaagttctgttgtctcttttctgggggtgcatgtcacccttaccaaaaatgtgtgtggcccctttaataaaatcatctactggaagtagaagccaccaggtagacttgagtcttggggaaacacaaaacaaaactgagtccctctaaatatcccttatagatccatgcatggagggcctctatctggatccttctcaatgcagggaatggagtctcaattccttacctcaaatgcccctgtgaccctgggctgccccagtccatggctgggttgacttcagtggcttttgtgccccagcctcattcccaacagcaggatgccaaaatatgatcctggatgcactctggaaacatttaccacttgccaaagggaaaggacggattctggcctgtgtctgactaattaatgaccttgaatgagccagttcacccataggtgcctctgctgcattagataaattcaagtgcccctctatgccttattctatgattatttgaagagcttttgggttgacctccatggggcagatgactcacctcctaaatgaagttagtggctgggaggaaggggtaaaaccgccataactgagcacaagttactttcaggcactctgcggggcatttttttcctccatgtcatctgatttacccctcataataaccctatgaaaggtatgttattagtcccattttgtgcattgggaaagtgaggtttagaacaatgaagtaccatatccaaattcatggcaaggtgtggattttttttttttttttgccaacatttggccttactgcagtctgtgttctatccatcaccctacgctggataatctggctctaaaaatcagtgggggaaaatggagtctatatagccatgttcatgaatttaactgaagtagtttaaatgaactttgctaaattgtagtccaaggcaaatatatggtcgatagttcaataattctgggtttttaaaatttttggatgacttggtattatgatagtagctatgtaatcttgaaaaaaatcactgcacttactagtatttccatttcctcatatgtacaatggaaacatgtacaccctatgctacctctgatgactaaagtgaagagtgaacaagtaatgtacaaatgcactttttggattgtaaatgctatgcaactttgatttagtatataacttggattgttagatctggaatatctaaacaactacttttagttccaatgtgtaaatccatttatagaggtttttgcatgaaaatatacagagagacagaaaaatacataaatcataactaatgatgtagcttgatgggttattccaaaatgaacacactcctgagaacctaacacccatatgagggatagagtattatccagaccctagaagttctcttaagcctcctcctaaccactacctgctgcatcctttgtagaggtgatcactatcctgacctctacaacatagattagttttgcctatttctgaactttatataaacagaatcatacagtatgtattattttatgttttgcttcttaaacacgaaggtaacagttgtgttttaaaaaagaatgtttgtgagatagccgggtgcagtggctcacgcctgtaatcccagcactttgggtggctaagttgggcagatcacttgaggtcaggagttcgagaccagtctggccaacacggcgaaaccccatctctactaaaaatatgaaacttagccaggcgtagtggtgcacacccgtagtcccagctactcggtaggctgaggcaggagaattgcttgaacccgggaagtggaggttccagtgagccgagatggcaccacatacacacaaaaagaatgcttctgagatagatcttgctgttgcagcagtttattcttaataattttattaactttaattttattaataaatttattaattttgttaataagtttattaattttcaggactatatagtatcttattgcataaatacaccatgatttatgctagtctattatattaattgattattaaatggcaaaccactttgaatttctggaacaaactcaacttggtctgatatattattcttttgtagattgcagagttcagcttgataatactctgtttaggctttttgctgatgtgcttatgggagagattgttctgtactttttcccttcttcttttgcaatgtttgttttaggttttggtattaatgttattttgacttcataaaatgaaatgaaatgttatttcttctaaactctgaagaaatttatgtaaaattggtgttattaattccttaagtgtttgagagaattcagcaaagaaatatcagggcttgaagttttctttacggggaggttttaaatcatggaactaattattttaataattagttattaaattattatttaatctatttagagagtttttattcttctgtcagtttgatatgttgtgtttttccgtgaatttgttcattttatctaaattttcaattaattggcatagggttgcttataatatcttacatctatttaatgtctgtagtgaagtctccctttctttggtcatgacattgatggtttttttccttctttttttcataatcagttttgcctaaagcttatgagtttcacacgttttccaaagaactcatcttggccaattaaaattatcttcattgcatttgttttccatttcattatttctgctcttatctgtatcatttccttttatctactttctttttctttttctttttctttttttcagacagagtctcactctgtggcccaggctggagtgcagtggcacaatctcggctcactgcaacctctgcctcccaagttcaagctattctcgtgcctcagcctcccgagtagctgggattataagcacatgccaccacgcctggataatttttgtatttttagtagagagaaggtttcaacctgttggttaggctggtcttgaactcctgacctcaaatgatccacacgcctcggcctcccaaggtgctgggatagcaggcgtgagccactgcacccggcccttttatctactttctttgagctacaaatttccctccaggcactgctttagctacattttacagttttgatgtattttctaatttatatttatcaatatatagcatatataatttatatttattgacttgtatatctctatataaatctgtaatatataatttatattacatatatttatatctaatatatgtatttctttaaagatttctgcataaacccatgatttatttataagtgtagtgcctaatttcaaaatgtttggaaatgttctaattcccttttagttattgatttccaatccaaccccactgaggttagagaacatacccagtatgactttaatcttttgaaatttgttgggacttgctttgtaaacccgcatagggtcaatttgtggtaaatgttccatgccatttactctacagttgttaggtatagtgctgtataggtgtcaattaggtcaagtttattatttgcatattaaaatactccatctccttactgtgattgtggatctattatttatttttccttaaatgttccatgccttttactctacagttgttggatatagtgctgtataggtatcaaataggttaagtttattatttgcgtattaaaatactccatctccttactgtgattgtggatcttttatttatttttccttattgttctgataaatttgttttctatattttgggtctgtgttgttaatggcatatcagtttaggattattatattttctgtgtacattcacccttttataacaaaatgtcattatcattataaaatgtccctctgtatccagttatgcttcttgccttcaggactattttagtattgatgtggctacacacactttcttttggttagtgtttgcatggtgtatatctacttccatccttttattttaaatctttatcatatttaagatttgagaaagatcttgagaaaggcagtgtgtattagctatgtactcatttgtaaccagttaccccaaagcttaacacctaaaaacaacaaaacatttaatattccacagattctgggagtaaggaattcagaaacagctaagcgaggtggctctaatccagagcctctcatgagcttgccatcaaagtgtcagccagcgccgtggtcatatgaaggctttactggggttgaattccagtaatgctcgcttaaccatggttttgctttctgaggtttcagtcacccacagtcaactataggctgaaaatattaaatggaaaattgcagaaatcaacaattcataagccttaaattatttattcaaagtaattatttattccattactctgttaaatgtatactcatatttaagttgtgcttattagcagcatattttttatcatgtctcctagtctttgtcattgtaccaaaacatttaatctttgtatttaatatagtttctgagatatgtggtttgaaatctacccttttgtctttgattttctatttgtttcattttctgtaattctttttctctcattttattgcagtattaaaccatgtccacagattctctgataagaagtggaacttaatctctttttccttgagtgtggcctagacttagggagtcatttctatcaaatagaataaggcagaaatgacagtcagtgatttttaaagactagattaaaaaaggcatgtacctgctttataaattttataattaatttatatattaattgagattaacaatatttaataaaatagaactattataacaatatactgtaataaaagttatgtaaatgtggttctctctctcaaaatatcttattgtactatagatcttagcaacctcggcatatgatttttttctttccttagtaagctgagaactttcaccttttcacttaaagaaagcactttctggcctctttttggcttatctgaattgccagcagcactacttttgtgctttggtgccattattaagtaaaataagggtgactgggacacaagcactgtgataccgcaacagataacctggtaactgagatgactgactactaagtgatgaaaggaagggtatacagcacggatacactgaacaaagggatgattcacgtcccagttggcatgagatttcatcaccctattcagaacggtgtgcaatctaaggcttctgagttgtttatttctgcaattttacatttaacgttttcagaccatagttaactgtgggtgactgaaatctcagaaagcaaaaccatggttaatgggtgggggtcggggggcagttactgtatttctaccccaggcaagacttcatgtgactgaagccctggctaacaccttgacagcaagctcatgaaagactctgagagccatctagcttagctttttcctaaattccttactcctagaatctgtgaaacattcaatgttttgttgttttaagtgttaagttttgggacaacttgttacaaatcagtagacagctaatacatatttattgccttatttggaataattttttattcctttgctctgctaaatgtttgttgattataccttcttttagtggttactctaaattacaacacgcatctttgacgttaaaatctaatgtaaattaataccttttaaatcactcatggacaaggcaaagtccataggatactttgttttttcctgcctgtagggttacttttatcacatattttaattctctgtctatttttaagcctcacaagatatttttagtgtttcatactgttgtattttaccatctccattgctcctcattccttcttgcagtgtacatttccataggaaatcattttgcttcttctcaaagaattctttttataatttttctgtattgcaatactctggtgacaaattttctgtttttgttgatctgaaactgtctttattctgtctttattttaaaatatattttcactgagtaaagagttctgtttgcagttattttcttttagcactttgaagatgccactccattactttctgacttctactttttctgtttagaagtcatttgtcttacagttgctctttgaagataatatgtcttttttcttttctctggctttaacagttttttctgtctttggtttccttttttgctttctttctttcgtttttttttggagacagaatctcgctctgtcgcccaggctggagtgcagtggcgctatctcgactcactgcaagctctgcctcccaggttcacgccattttcctgtctcagcctcccgagtaactgggactacaggcgcccgccaccacgcccggctaattttttgtatttttagtagagatggggtttcaccgtgttagccaggatggtctcgatctcctgacctcgtgaaccgcccgcctcggcctcccaaagtgctgggattacaggcgtgagctaccgtgcccggccatgtttttggttttcaatgcagttttactatgatgtacttagatgtagttttcttagtacagtcatgcatcatataaccatgtttcagtcaatgacagaccacttacacatcagaggtcctataagattgtaatggagcataaatagaaacctgatgtacggcacttgatgttggcattacaaatcaaataggggaaatgattgatattcagtattggtgctgagacatttggtttttcatatgaagcatatatatatgtgtgtgtgtgtgtgtgtgtaactaaaaatatgtatacatccagttttatgtaagtacacactaacacactctgaggttcacacaatgacaaaattgcctaatgatatatttctcagagcctatcctgtcattaagtgacacatgactgtatttatcctgcttggtgtttttagcactttttaaactgtggcttgttacctttcagtagttgtggaaacttcttggctatcgtctctttgaacactgttcctacctattctcattctcctctcctggaattttgaatacatacatagtggacctttcatcatgtaaccttacatctcttatgtttctttttgtatgtttctgtatgtaccatttataaacaaaacaaaactatttcaatctggttatttcctctgactgatcttccagttcattaattcctttttcagctttctgtcacttactattatattcattcattaatttcttaatttcagttcaagcatttttcagttgtagaatgtccactttcttctttttacaggttcaagttctctgctgagggtttccacatagccatctaatttcttggatttattaatcacatatattttaaactaaatatctgataaatcctgtgaggctgttcctttctctgttgatttctctcagttttctgttatgtgttcatgtctcctggtgtatgaagtaatttgcaattaaacacaaagcattttgtataaaaattgttgagacaatttgcagctctgtatgttttgaagtcagttggtttggaatgacttgcctatgcagatattggggtgattagagtctgagtttcagtacctgtgaggctgttctcccaagtatagctctctgagcaccccagtggaaagcctgtgctctttaccagcacctcttttctttggagagtccttcactccaattttgttcctgctccctgcaagacatgcagaagtttcttagcttctcagcatctttctgagaaacataaaatgccttgaggagaaaaataaagtaatggacatatgtcagacttatctcacttctcacttctttttaactttccttttttccccaagatattggctcctcaagtccttgctactttggtttgatgtctccaaacacacacacacacacacacacacacacacacacacacacacacacagagagagagagagaagtgatttaaaattgttaatttttctctgtgtgagtgttaatttgtaacacactattccaccaccatcgatggaggtagtaatctttcaaaacctactttccacaaaccaaataaataactccacctaactttagggcaggcaacctggtatgcttctgagaaccagttctgtgaacacacagatcatgcttatgatttcagccagtgcatcaatttaaactaaaagtttaagatgtttatttttcctcattttattatttctcttatttgttctatagtcatcttaatctgtgtaagaaatactgaagctgtccaaaagttcaaatttgaacccaatgctgaatttaaaggtgttgccccaaaaaacattaggtaaacatgcaaggatcgtcactgttaacctgttacgcaatatgacctggtccccaggctacataattttagagtcattctttacatttcaagctctgcaagcacttggagaagtggtgttctgtggactcttacttcttcctgactttttgatgttctcttttgtcaatgtgaccaaccaattttgaatcagagctactggcatctttagaatgacatgtatggtggctcagaactgtaccctttaaaactcagctccagtaaagggagattctgagcattttaagatgttggaaattgagttgcatcctgcattaaaggcatttcttctttatataaactgtaggattctgttaagacagaaatggggagagctaatgggctattctgaaagaactacccattaaattgtaaagtacggtatgttttaaagtgacaaacccaagagctgaaaatgactctttgatctttaaaaggctcataaacggtggcagcgtactcacagacctatatttatgtattcaaatattgggaggaaatccaagtagagtctcaagactgcgggactttgcaatttagacaaaaagaggccagggaggagggcaattaaatcaaactttttacagcataaagcaagctttcttccctccttgttaatcaatgaactagaatcttggtaagggcttgctttttaagtggggtttgagccaatctttacacagatgtgaggtatttgtgaagaaagaaagagacaattgaaaccacaaccaatagtgttttgtttttgaattaaatctgtggttggtgccattctgttttactttgatgaagggtctctaaccatctcctactcctcagtgcccacaaacatatatccccgttgcctggtattgaaaccattagccacatccggaagggctaatctatggacaacatgcctatagcctctgtttcatggaacaacccgagagggctcataaacaactgcagggacattgtaagggctttgaggatggcggttgttaagaaacattcaaagaaagtcagatcaccatgtgacttacactgatgaatactttcagcctcaacggcacgttggcgttttcctctgacccaaatgatgcaacagaaataaattctaccttgcatacaagaaccacaggcactggaatgtggaatccgaagcttttctacctggttcccctggtgaccacaggtatttaatggtcacattacagattagtttatgggattccaagaggactatggaccagagcaaactcagttgatccaaaattgagttttgatcatgttagcagtctacttcaaccaaattttgtggataatgacaaaataaatatgcattctttaaccacctaagctaataaacagaacaactgaatcccagaattcccccgtcactccccctctgctaccaaatgtaaactaggatcctaaattttgtgttaatcatttccctagatttttaaaagtatctagatatgcttgcataaaaaatacatcatttagttttgtttgcttttgaagtttatataaatggaatcatactctgtgtgctcttctgattttttcaccataacttatcttgccgtatgtaatggtagtccatttttttttttttttttttttgagacagagttttgctcttgtctcccaggctggagtgcactggcgtgatctcagctcactgcagcctccgcctcccaggttcaagtgattctcctgcctcagcctcctgagtagctgggattacagacacccaccaccacacccagctaatttttgtatttttagtagagacagggttttactatattggccaggctggtctggaactcctgacctcaggtgatccacctgccttggcctcccaaagtactgggattacaggcatgagccactgtgcccagcccattcctgtttatctctatatactattccactgcaagaacgtaacacaacttattatctattcttctgttgtggacatttgggttgtttccactttttgctagtacaagtgctgctgtaagcatttgcatacatcttcgggtacacatgaaaggagtttgtgaagtatttttctagcagtggaaaacactactagaaatagtcttagggatatactaggacttattataagtgtgtgttcagttttttaggagtaatgtcagattatttttccaattggtaatatctatttatactcccacctgcaaagtgtgagagttgtcattgttctttatcctctctgacattttctattgtcttcttttttatttttcccttttatatcagtagctaaatgagatgggtatctaaaaatctgtatcttacatgtgtggaagctgagacttggagatttcaagtcatttgactacgtttatagagcataggttctggaaatgcgacatgtgtcaaggagcatgtcacccaaaaccaattcatagaaaacctgcctaatgattgatcacctaatggctaattctcttaaaattcacctctttgaaagtttcacatctgtaagctcttcatgtaaaactaaacacaaggtaacataattgattaaaactaactaaaaaaatattaactaaattttgagaaaagtatctttagaaaatctggcttaaaagtctctcatttattcacaaggaaaaatgacacttgctattttctaaatgtgtgcataccctctacactcatatactgaaatcctaacctccaaagtgagtatcaggaggtggggcatttgggaggtgattaggtcatgaaagtggaggcctcatgaatggggttagtacccttacaaacgaggcccaagggaactctttcaccctttgcaccatgcaaagacaaagcaagaagtcagctgtttataactcagacagcgtcctcaccagaacccaaccatgttgccagtctgatcttgaacttcccaacctccagaactgagagaaaaaattcctatcatttataagccactcagtctatgatattttgttataacagccccaatggactaagacaacaccaaaatgtttttaaaaaattcattatttacaaaacactgtaaatttgatgactgcttatcaaagatttaaaaaagagagatggccttagatatattgaatatttaaaaaagcaagatggcaaataaaaatggcacatggaaatactgcaaaaacctctaaagttggatggaattttaagggcatttgtcaggcacatggatcacagtcgaagtggtttctaacaaatccacctagacattttaggtttgttggaaacttggggcagagttgccgatgaactagcaggggaagcaccttatggtagatgctagtgctaccctcacacctcccctcgctgcctcattattttgtagtccttgaacaccctgaagggctcttaagaatctggaagaaatcagaatctgaaagaagataaagcacttttacccctggtcagtgcttctgccaaagttgactcatagaaaccatttacgtgtatgtcagttataattcggtttgtttgcagtgacagagaaccccacatttgaatgctttatgtgagagatagatgtttaacttctttcatggtagatgaatccagacacaagcaatccagggttgggatggggcctccacaaagacactcggccaagctcctcctaacaccatccacccttctagggatgtggtgctctttctctaatcatcacctcttcatttcaggcagtagggctggggcagaaatggagaatgggcaaagcatgtaaactttaaagaaagttttctggaaactgccatacccacctttatttagataacattggccagaaatttgtcatatgggacaccaagctgtgaggaggctgggtggtgtggtctttcttccaggccgtcatgtccccaagggaatctatgactaaggaaaaccgatattggggtaggcaactagaaatttttacctctctaaagttctttaatggaagaaaggtacaagtatttcagctatataaatcctattgcttttgtaggttttaacatgcaaggaattctgtttgacaatcaaactcaaggcacgcacaggcttagtgaactccctccattcttcactgccaggtgatgtagggagaaggtggagccaacactcagcccactgcccatcagcagtaaggccaaaggaagaggaaattcctcacctattaacatggacaatgagaccatggggaggacagttcaagggtcttctggctttgcaaagggtcagatctggatcaccgaatacatgttggaagatggaatactgctttcctgttaagtccatgtatatggctctcatgcaccattcctgacaagggcagaccagtttttcttcagctaccacagtttccacctgagtggattcttcatagttgtactggaagaaatcttgaagagcattgagttcagggttcccttctgccccactatcagactggggttcctagataaacttgcccctctccaaattttcatctcagagaatggccatttcatgcttctagttgtttaggccccaaaccgtatttttctaatgcaccatatgatatggtttggatttgtgtccctgcccaaatcttatgtcatatcataatcaccagtgttggaggaggggcctggtagaaggtgacttggatcatgggggcggacgtcccccttgctgttctcgtgatagcgagttctcatgagatctgtttttttgttgttgttgttgtttgttttgttttgttttgttttgagacaaggtctcactctgtcatccaggctgaagtgcagtgtggtgtgatagctcattgcaacctcaacctccttggctcaagtgatcctcccacctcagcctcccaagtagctgggaccgcaggcatctgccaccatgcctggctaacttatttttgcatctttttttttttttttttttttttcgtagagatgagttttgccatgttgccagactgagatctggttgtttaaaagtgtgtagcacctcctccttttccccttccccctcctcccagcatgtaagacgtgcctacttcctcttcaccttccagcacaactgtaagttttctgaggtctccctagccatgcttcctgtgtagcctgcagaactgtgagtcaattaaacctcttttctttataaattacccaggcttaggtagttctttacagcaatgtgagaatgaactaatacaccatatctaatccaacagcacatcctgttggatctactttcagaatagattcagaatccaacaacttcttacctctgccactgcaataatctcttacatggaggtcccagtgggtgaatgggaactgaaacccaaccctgctccactggctgagctgtgtacctttctccaaggctgcacccacctggaagaaggggcacccttttctatatataccaagatgccctctacaggcatctagcaacttcccagtagttcgtgttacctctctgctcaaaaccctctcactcagaagaaacgccaaaatctcacaatggcagcactatggaacttggcccaggtacctctgtgatgccatgtccttcagccacactggcctccggcgagctccgcctttacactcactattccttttacctaaattggctaactttcccacatccttccagtttcttcacagggggcccttccctggattgtagcaccccaaccctggtgtgtccatctctttggccctccatagccacatcctcatctactgtgcctaaaattgtgtcccctaaaagttatattcaagacttaacgcctaagacctgtggatgtgaccttgtttggaaataaggtgtttccagatagaatcaagatgaggtcatacaatcaagatgaatcaagatggattcaggtgggcctaatccaaggactggcatcctggtaagaacagagaaatttggacatagagacccccaggggagaaggtcttgaggaaggaggcggcaatgggagtgatgcatcgaggcaagcatcctagtccatttgtgttgataaaatacctgagaatgggcaatttataaacaatagaaatgtattttctcacagatctggaggctgggatgtccaaggcacttgtgggtttggtgtctaacaggagctcggtctttgtttccaagatgatgcctcgttgctaccagagaggatggatgctgtgtcttacgtggtggaaggggcaaaagggtaaaaatgggcctggctggttccctccagccctttgtaagacactaatcccattcatgagggctccaacctcatgacggaaccacctcctaaaggccccacttctgtgactactgccaggttggtgattacgtttcaacataggaattttgggggacacatttaaactgtagcagcaaggagcacaaaggattgcagaatccaccagaaatggagaaggagaaagacctggaacaaattctccctcagatccttcagaaggaatccaccctgctgacaccttgatcttagacttctggccaccgtaactgtgagacaatacatttctgttgttttaagccaccaagtttgtggttctttgttatattagccctagaggaaacaattaccccgtccaccatacaatatgttacttattaatttgcttagggtctgcctccccattaggagggagaggattctgtctgtgtttattgccacgtctcctgtggctggcatggggcctggcacagagtagatgccacaaatacttcctggaaaaatgaataaaagttcactcagctgaacctggtatgtgggtctcccagcacctcctgtggccatttctgatgcatcctccgccactcccacctgcagcgggtgactgactcttcagtgacagaggagctgcacacaggtggcgaaacgcatctcatgtggacgtctgaacctagtgcctgcccaggctgctagatacctgagactgtgatatggtttggctgtaatcccacccaactgtcatctcgaattgtagctcccataattcctacatgttgtgggaggaacctggtgggagataattgaatcatgggggacggtttcccccatactgtccttgtggtagtgaataagtctcacaagatctgacggttttataaggggttccccctttcacttggctctcattttctctcttgcagccgccatgtaggaagtgcctttagccttctgccatgattgtgaggcctccccagccatgtgcaactgtgagtccattcaacctctttttctttataaattacccagtctcggggatgtctttgtcagcagcatgaaaacagactaatacagactggtatctagaaactcaccgatcttatgcagttcttcccaccagagatgtggttcttttctctggaactaggacacagggagagtgtgagttatcctagggcatgatctgggtcttattcaatttggaatccccagtaataggcagagagaaagcacaggacagagagctgttgaacgaattactgggtaataatagcttatattttttagagcattcataaggtagcaggcactgttcaaagagcttggcgtgcttcaatgcatgtcaacctcacaataaacctattattttaattttacagactgggaaagtgaggtgcagaggtattttgcaacgtgcccacagaaccccagcgagcccgtgttggagttacaactgtgcctcagggagcattctcaggcagcattctcttatgcttcaccgtctcacagatgataaggtttcattcaaggacttacaacagcaacccggagggagcattctcagtggctggtagatgccatttgtactgagcaggacaattaagcccaattctggaaaaattctgctttctctattcaatgcattttataaatgtcttcactcagcacatttaccctactaattatattttgctttgtgatcatggtatgtcatttgcattccttcagcacacactgactgatggggaagagatgttgggtgacccaggcaagccaaacaggattaaagcctgctgtctcaccaggtggataatccactttgaacacttgagaggggagtgttgagatcacaccccttcccatgggacatttttctgggaaataaaatcggtgacaaacaccacgcttgaacactcacattgactctagggtgcaggctgagctcatctggtgcaggggagtaatgcagaggcgaggcctgagtcagcgccaggcacaggaaggggatgcaggatgcaccacagcccatgcctcttaggagaaaatctgggccttctccatggctgtgtctctattaatttgctaaggctgcccaaataaagcaccacacatgggcagcttacataacaggaatttattctcagttctggaggccggcagtctgagatcaaggtgtcagcacagctggttccttctgaggactgtgcaggagaatctgttccaggcctctccctgaacttctgggggtcactggccatatttggcattccttggcttatagaagcaataccccaatttctgccttcatccgcatgtggcattctccctgtgtgcgtgtttctgtgtccacatttttcctttttataaggataccagtcatgttggaggtctaccctactccttgatgaccttatcttaactagttatatctgcaacaaacctatttccaaattaggtcacattctgaggtcctgggggttaggactttaacatatgaattttaagaggacacagtccaacccataatagtaactttgtccctctctctcttttgacacaataatgaccctatgcagggatatttctaggtggctactgtctgtgtgtgtgtggtagggggacttctagtactgttttggattactgttgacagacagcagcctgaggctaggaagcactttggggccatgacttagagcaaagctagtaagttttctcaggaatttgaacccagaatttcatccccatggcactttaatccagtacatttaatggctcagatgaccctggccttatcagcctggtgctctaagcagctgacctaacagtgtgtgcatgcgtgtatgcacatgtgtatgttatgtgcatatataagtgcatacacataatgttggacacagaaatatctctgagaactgtccctttatcacccttcagataaaattattctcagcttgcttagttgcagtgtttcttactttgcatctcctaacactttcatacatttctcccgaagtgcataggcaaggagcttcaacggaattcaatgtcaacctggtcatcttaccatgatttctaggaaaaaatgtgtgtaattggttcatgccctccttctgtacagattacaattctccttttttggcatgaaaacctccatctgtcttttgaaagcacatgtcacttatttattaaagtcctccccaacttgttcaggttgagtttcactagtacctttctggagtattttatacctatgttatagccccatatgttatactttggatgtctgtttacctgtctgtaagactgtctgcataattcatgggccttgtacaaaataagaattcagggactcttgttacaagaaactattaagaatttcaagatgggtcaggcgcggtggctcacgcctgtaatcccaacactttgggaggctgaggcgggcagatcacgaggtcaggagttcgagaccagcctggccaacatggcgaaaccctgtctctactaaaaatacaaaaatgagctgggcgtggtggtgtctgcctgtaattccagctactcaggaggctgaggcaggagaatcacttgaacctgggaggtggaggttgcagtgagccaagatcgcacggttgcacttcagcctgggaaatggaatgagactccatctcaaaaaaaaaaaaaaaaattaagatggagatagcagaaccatataggaagtgtggggtccttgtaagagtgtggtccataaacttggctttgtctgtctgcctggttcatggattgtgactatcctcagttccccagtgcccatcattcaacaaatgttagatgaataaatgaatcaatatgtgaatgactgtaagaataagcttttgatgaaaggcagccattttgtaagcaagacattgctgcttttaattgtccgcagaaagcctcacagaatcactgcggtgagaggaaaaaaagtgtctgcatgcaattattcgtaataacaaataatcatactttgtatgcgtgtaagacttttcatgttcaaaacactttcaaaacattaattaattcttacaacagcatcaatgaaattgaaactagaaggagaatttgaggtatgcaaaatttaattaccaatattaaaatttgccacacaactcacactcctcccactgggccaggaaacacattccatgccatcttctctccctctgaaaaaaacatgaacatgagaacttagttctattatatcagtcaggaaggaggcaaaactatctgtggagaaaccccaaggggtggggagaggtatttatacatctgagggaggattgcatttattcatctgtgagttccctttagattctgggatttaggattctgggaacccaggtaagcatcgtcatgaccacagggtgggctcattttgaataaagatgtggggaattctgtgaggttataagataaaccccagccagttctttcccccgacccccaagaaatggtggtgacttcttagaatcctgagccacattgggaaactctggtggggactttgtctacattattggagggtgggtggagtgtgggtgggaaagcttggccttatacaaagacagcccaaagtgggcaatgtggagctgcttctagaaccctgaacattctgaacttttggatcctctaggctggaggggtgggggtaggcattggtgcaccttagcagggggaggagctacctgtcctctctggagcagagagagccttcacacggaggacacctgggctctgtttcccatgaggcatgaggccactgggtggggggtgtcctggtgtcctcagccaaggactcctgcctcctgaaggaaacgagagcatagctccacattccctaagtggggctgtgcatcgtgacttccttccaaaggggacagtgaaaagtcgggggagataaaagggtaacattctggaagagagatataacaaacgctacttcagccaggcgatcaaggtcaacatcaaggcacaaatgtttgttgttttcttcttcaggcctaggtttctcctctgaaataacttgagctcttcagaaggtacaaaatctctctgacactaaagtttagtttaacgactggctagagacgtggtaatcaagcatctcactgacaagcttctgttttcttcttctttgtgcatggccatgtccatgtactgcctgatcctacccctgtttcctacctgtgctcaggagcggtgacttctaggtcacatcctttcttgctgaccccactttggttcctgacattttttgtggtcctcctgcagaccatttaagatcaatgttaaagcaaactaaatatggcctgagaaggactccatatttctatatttgagtcctgtggatgaactgtaacctagcttaatggtcagacaaaattaaaaacctaacttaatagtatgcacctgtaacaatagctaagggttggccaatcccagtggtcataattcaaccactcatagactcctgaatgttcaaactgcgttcaaataaggcaaacgccaagctgtaaccaatctcactgtatctgtacctcacttccgattcttgtacatcactctacctgtttggtctataaatttgttctgaccacgaggcacccctggagtctccgtgaatctgctgtgttcctgggggctgcccgattcacaaattgttcattgctcagttaaactcctttaaacttgattcggctgaagattttcttctagcatcagtcatgaggtcccatgagacagcagtgacagaactggaagatactttagacagtaattcttggtgggaagataccttgagttgaacccagagtcttgaaactaaaatactaaagatactttgcactggggtggtggtgagagaagtatttcttttaaaaaactcccaaccactacccaagcctgattcctgcaatgtacagcaatgaaggcagatgaagcttcctggccttaggttgaacatacagccctttccactttgggttggctagtgtcatgtaactctttttagtttctttattattattattatttttgagatggagtctcgctctgtcgcccaggctagagtgcagtggcgcgatctcggctcactgcaacttccgcctcccgggttcacgccattcttctgcctcagcctcctgagtagttgggactacagccgccaccacgccaggctaattttttatatttttagtagagacagagtttcaccgtgttagccaggatggtcgcgatctcctgacctcatgatccgcccgcctcggcctcccaacgtgctgggattacaggcgtgagccaccgcgccggcctattattattttttaaaacaagcattaaaacatgcttcagtgctctttcatatgcaaagaagcaaccctgggagcctgcgccttttccaggccctcatgccttcagaagccagagtgtgctaggagcaccgggggtgaggacatagcttcagcctgaagctgttcactggaggtatcttcctagtgtgtgcagtgggccttactcagtttcccaaccctccatctcagagaaagacaaaaccaattggatatggtgtatgtacttgtcaaactgtttatttgccattcacactgattgtaacactggatttacagaagaaactgtggtacaaagagaggaaggctctggtggctcctgaacagcagcagtccagctgccctgctcaggctgggcacgacgaatgctcccaggagaggggaggcggcccacccgactgtgtaccgtggactgtggacagtgcagtgcctgctctcctgtgctatctagaaacaccttggagagagggttctgggatattctctcatgtcatctggctgaagacaccagcttgacagttcccctttaagaagcattccatacgtttgtaccagggagaaagaagcccacgcacgaattttcaggatgttttgtgaccaaacccaataactgccacacaaatagaccctaggtgggggctggcttaaataggaccacatttcccgttgctttttcagtagatgtgttataccgtcatttcaatttgaaagtttatttttttccattgatttttatacatccagaataacacaaataaccaacagttctttttctttttttgcacattcatttcccctagaacaaaaaaagtgaacttaaaaaaaattggaaccatgctattagctgtttacaaaagtgaataagaagtagctcattttaaagtctaaaataaacaaagtagaaagaagcatttttttccctacagtatttagcaaacctaagaaaaagtccttagaaacacacacaaaaaaattgaaaaaaagttataggcattaacaatattttataatgaagcttaaaatctatttacatacataaatacaattaactttgttgatgcaactcttctggaaggaaaaaaagagccaaatgatcagcctcatcaatactgacctggctaaaaacaaaattcccaacaaacacacaaaaatcccaaaacaaatgtatacgctacggtaaacaaaaaggcattttgttcagatgtaaaatatgttttgtgagattattgtcaaacaaattttcatgtataaaagacccaaacatgtcattccccccaaaaataaaaaccaacaaaaataaaaatcatcaggacggaatgtcccaaagaaacaggtatttcaaggcagaaatctgcaatcctaaattgcaggacatttgagtggaaccattcatttcctttctaatcagagcatttctgtttatctgcacagaaacccaaggcagcagaaaggctgtctatttactcactgattgtgatttgcccaggaaagtttgctggtttggacagcaagcagatccaatatggttggcaatgtctctgttctgctggaagaaacccataaacaggagaaaggctgacaaaccatgttcctttatgtgaagggggaagaactggaccttcttgtgttctgaaatttggtactgggtgggggtatgtgctatctgcttaagagaacacaggaaaaggaggagggagaaagtggggtttggaagatagaggaagagagaaaaaaagggagatattggggggaagagagggagggaaatgtattttcagatagtgagaaaaagaaagaactgaaatatgtatccatgttgaaatcataaatagggacatgagtaagcagtagaaatggcttattcaatacttctcctggaccagacacatgcagttattacatgattggcttaagggtctcattgataccttaactttcctgagggcaatgaataaaaagataccttaatctacctgaagtcaatgaatgcaatttttcacacacacacacacacacgcacacacacacacatacaaaaatgtgttgcgtgagacctatcgccaaaacaactacagtttgattttttttgaaacaattaaatactatatatgctggtaagagtctgtgaaactctaaatgaccaatccagtgagcctacaatagtgacaagccccctccacacatggctttgagagtaaaggttcaatgtaaaagattatctaatcagagcatgaggctggttttgagttggaatatcttcagttaacagaattaaactgaaaaacataattttttccttcatttttctccagcatttttgcaggtcagacatggtaacatgtgctgaaaaaaaacatttacgtttaatttgggggaaatgggctaatggtgcttttcagaaattaaatttttacatttgctgacattttatggtaatttagctgcaaaaatgtaatacggaataatatatgaaactgagttgtggagggaatcctgtcaaaaatgaaagtgaatatattctgagtttgtccgagatctgctatagctcttctctagataagaacgacctgacaacataagctgctttactctttaactcttaccaaagtgctactgcatgtgtgtaaaacaaataatcaatatatatataagaaaactcaaaaacaagttgttttaaataagtccagctgtttttgctgcctgcagccaaagatttgcctaatttgaatgcttaaatttataaaataaaaatcaaacactgttctgaagtcctgctttcaaatactcttcagagttgacctgaaatcgtttcaacgaattttaagaggtacgttaaataaccaccagatcatttggagcacacatgtgtcaaaatcagcagttagtatttatgagttgtacaacaactgcattctgaccaaatcctccaataaaaatagtgccataaaatttacagcgacattggatacctttgaattgtagccacggacagtagtgacatgaatctttcctgtcacactggtgcacaggtaaaagcccatataccccatagggtagggtctcagcctggtgaaagcaacacaaagatgttgttgagtgagcagcacaggacagggggtctcgcacaggtgggaccatgttttcccacttgtctccactgaggcacacagaggcaaattgactcctcgaggcctgcttctggtgggcccttaaattgctataatcgtaacccctaaattcattgatttggttcctatgtaaatgtggctcccctacacagtttactttggctgtgttctgttacacagcatctgtgaaattatcagatgaccttggggtgagcaaatccctgggcagaaatcaaatcctctccaaagatgtaattattggcacctgcctcaaccctctggaactagattgaccttctctgttttaaggaggaagttagatatgagacccttgttgagcctggcagaaaattccatacttctgatccttggagtgaccctcagtgtctaaaaatcctattaaaaacgttgctgcgtgagctactcacttgtttgattaacatgaaagggagtttaatgtaaacaatacttctggataaccaagcgatcacattactcattctttttttctagccttcttcaatgtgatacatttaactttggctactatcaagaacaaaagaaaatgtagtacttgatatttttcttaatataagtacatttaaataattaaaaaattatcaacacataaatgtctgaacatcaagatacataaatatctggggattccttgtgggaatacagtagttaaaaatgacccaaagctgtagctgtttctcaaaaaaacaaaacaaaacaaaaaaaaacaactacccaaaagtccaaaagaaaagttaaataaaacttaaagaaaagggaatcatatttctttccatggtcaaagcaagaaagaagcaagctcaatttatatatatttatataaacgtatataaaaataaaaaccacccaaatgcaaatacgcattttgcaattgataaggtgcggaaaaattaaaaataagaattagatgccaaacagggcgagttgcatccctcctctccccccaccccaaccaaaattccacactctttggaataaacaacttggttaaaaagttaagtcaagggtataaaatctttctttttattcacagcattgctaaatcagaagcattcacagtttccctccgggaatcttcctgtttgctttccagcgcgtcccctgggtgctggggccggcggacaccctcgaggtgcgtcgcctcggacacctccgcgagggccggggcgccagcagacggcggcggcgtgggcttctgggcgcaggaggctgcgcgggcctgacctacagcgagatcctggccgtcgggcgccctcggccccaggacggtggccgggcccagggcccgggatcccggcgggcttgtcgcgaacaggaggcccgcgcgcccggaggcgaaggcggcggcccgcggggcccagccgggccaggcctggcgcctcagtagggcctccacacggcctcctccaggcgcgcggagggcgccatgttggtgggggagttgctgtggctgccctcggcctccaccacgtcgctctggttcgggaggctggggttgagcagcgcggagccggtggaggcgttggtgcagggcggcaggatgcgcggcggcgagcgctcgccgcccaccatggagaactggtaggagccggccgaggcgccgtagtacaggtggtaggagggcgagctggcttggaacgggcctccctgcgcttgcgacgagccggggtagggcggcggcaggtaggtgtggtagcgcgtggccgagcccatggccgacatgccgatgccgatgcccgaggtgaccggcgtcggggagtaggtgaaggcgcctggatagtgcatgcgggggtcggagatggagggcagcgcggggaactggcgcgggtcgctgaacgctgtcaggtcgggtgccgctgcagggcgggcaagagaacggagcggaagtgagtaggaggttgcggaggccacagctcttccctctgccccagggggctacccaggatgataccgcctaggaggatgggaagccacccaggatgctactgctggggaggacggggaccacccgggatgctactcccaagaggacgaggattacccaggatgctatacccagggggacagggaccacccaggatgccacctcctgagatgacgaggatcacccagcatgtcacctcccaagaggatggggactacccatgatgctatgcccaggaggtcggggaccactcaggatgccacctcctgagaggacggagaccacccaggatgacaccacctgggaggatggagaccacccaggatgctaccgcctaggaggacgggggacacccaggatgctactgtccagggagatgggtttctatcagaatttaccgcccaggaagattggaaccacacaggattgctaccacctgggaggatgggggctactgaggatgctgctgcctagggagagggtttctacccagaatctgccacccaaaaagatgaggtcacccaggatgctatgcccaggaggacggggatcaggaggctgctactgcccaggaggatggtataatatacagtaatataatacggtaatatagaatatcatgtaatgtaatatgacatgatatatgaaatgatgtagtatagcataatatgtatagtatagatataatgtgcaatagtatatactataatatgtataacgtatataaaatgttgatataatcctagggttggcaaactgcagcctgccagccaaatctggcatttttgcatgtcccaggaggtaagaatgcattttacattttttaaatggttgaaaaaaaaatccaaaaaagaatacttcctgacctgttaaaatgacaggaaattcaaacttcagtgtccatccatacttcggaacacatcctcactcattctttcatgtactgcctgtggttgctttagagccactactgtaaagtcaggtggtcagtatagggactgcaggagccacagagcaaatatttattcttttttttttttttggagacaaagtctcgctctgtcaccaaggctggagtgcagtggtgtgatctcggctcactgcacccaccacctcctgggctcaagcaattctactgcctcagcctcccgagtagctgggattacaggcgcccgccaccaggcctggccaatttttgtatttttagtggagatgagatttcaccacgttggctaggcaggtctcgaattcctgacctcaagtgatccacctgcctcagcctcccaaagtgctgggattacaggcatgaaccaccgtgcccagccctaaaatatttattctctggccccttacagaaaaaagtttgctgaccctctatttgatcaatatattaatataccaataatataaattaatctgtgatattaatatagcagatgataatttgacactaatgtaaaggatgcacaaatatgttactactaacacaatatgttatacataatatatatcctaacaatattaatatataataatacattacacatagtatttaggttgaatgatagaaaattgccatttttataggccttcgacagttgaaaaattgataatttcctagtatttaagcgaatgcatggctcagtagcaactgctgagcgaatgtcagggaataccattaccactcctcctctccatatctactttcatactagttccacaattttagaaacagtactgccttgagttcacctggtattctctattatgcacttcactagtttgttaacacaagtagatgtaggaccttgatttatctactctgttttttgcacatgtggaaattttaccagaaattgtaaagctttgtctctaaaactcactttgttacgactgtacattattttgttaggattatggatttacagtttcaccaactggctttagggctgtcctgtggttcactggctctctctgcatttttcttacctacaggccgcccttgggaactacggaggatttgtgtattaggcagggttccctatatctgtagatcagagtttctcaactgttgacactgttgacattttgggccagatcatgatttgctggggtggagggggctgtctcgttcatcgtaggatgtgtggcagcatctctgctttacccattaggtgttagtagcatcgcccgcccctcttgtgacaactcagaatgtctccagacattgccagatatcctgcgggtggggtgacggaagcaaagtcaccccagctgagaaccaccactgcagatgtagaagggcaccctggagaagttcaggttccttagaattattcattaaatgaccaggctaggactctcctctttatatcagcaaatccacagacagcaacaaacagtagaaacatgaattcattgttttaaaatgtgaagttctcagatcaacacacaaaataactcttaagctcagatggcatgtggcctgtgtccttttgagttcaggctgatagagaaagtcgacagagccaaaagcttgctctgaaaggaaagctaccaaggtggattaatctgtttttggaaggcagcggcagttgatcaacttcctcatatttcaagcctattattccagcagggagagctagtgtgttttctctctctctcgctcgctctctcgtctcttccacaccccatcctccctccctctaatggccttttattgctctaacacatttttaaaaatgaactcctctgtacctttggggtgaatgtgatgaggggatacactcctcatcagaggtaattaaagtttatagaaacagcccaagtctgtagcagatcccttcactaatgaggaaaccaggagtctgactttcaaacaaacactcctgttaatcttttcaaagccaggcagacatgtgggcagggaaaacgttgtaaacggacagtggttctgaggctgcccttccttggccacactctagtcattctcgagccaggccacacctcattccacagggttcatccctgcccgctctttggggccatctgtgagcaagccctgtgtcacttgtttttgctgacatggagagctgtgacatgtttgagagttaacaggaagctttactccatttttccatttagatttatagagtctacggagaagctgggacaggaggaaaagcattaggcaaatacagtcagtttgttgtcatctgatgcaatactctggacacaaataaatgactctgcccattattcctcttgcttcatttgccctgagacaaaaaggtgaatccactggaaaatgaacgaaaggtcaccctgttttacagcaatgtctggacatgctctgccagtaggttccaactactacatggtaatgtggtgatggtaccaagttactggaatccagagtgagtccgtgatttgtcatggacataagtactggaatgatgttatggtctcagctgttgggggaaaatagttctttcacttgtgaggagaacatccaaaagaaagagctgcaatgctgcctgtgatccttcttctatgtacacatgagcaacgtcatactacaaaagaccatccatttggtcaaactatcttttttacacacattttgataatacaatatcttaggccttctagatatgctcagattcaaatgctatattcaaatgttggttttcatctttgtgtcttgtctcagatcccttattcaaacccatcagtctgcgcagttcacccatccagctgtagctcttctgtccttttggctggcctggtgtcccctgattcagcagaagtgtggggggagttgggatcccctgatattcacagagagtttttaagagtaggaaatctggggcttaggaggtccaggtattttggttggaagtgttttcccattgatggggctaaatatttgccatgacagctcaagtcttcgctctccagcttgacatggatgaaagcagcctcgctacagggcccctcctactgcccccagaggattaaacaacctgagcaggtaatggctgccttaaaaggagcttttgcatgactcagattaatgcatgctgtctgtcgcccaggttggcagctaaacattaattttttttgaaaaagaaaaaaaaaagtaaacctctagatgacaactcttttcagacaaggtgtggagtctgtctgcaaaggatagagagagagagacagacagagtccaagtccccagcgcagaaggaagcccaggtggggctggggccgggaagaggggcagagcacaaagctgtcgggctggattaaaaggcaaagcagccacagagcagtgtcaggttctcaaagctgtcggccaggcagccactttccttttatgtattccacccccctcctgcctccaggtttatgacaacacttttcaggcctgtgctccaggcttgatttctcagagggagttctgccaaattgaagagcagtctcccatactgttctatgccactgtgaaagctcatctggaattctgtcctccctccaaaaagaaaagaatcattcttgggttctgaaatgaggcatggtttttatctacttcacactcccatgccataaaatgttctctcttactccttgggtgattgaagtccaggatattcacaaatgtaactgtgatatgggactttggagtgcacatgttactcattccttttatttaaaaagtcaccctaccatctgaacaccagtcagctggaggagttggcccctagggttcttggactataaggtgctgatcttgggtgatgaccaagtcaaaagacttatgtaataaattccaaaggatagacccatagcaggaacatttgaaggagaacaggcattatttcaggtgaagaccgtagccggtgtgcagaggggtgccctgagaacaatcagtaaaagctgacaagtgcctttgttcttgagggataagcttctagaaaccacaagctaaacaagatgccaagatacctgtgctactctcaatgccttggagcagaatgtaccatgaaaatattggcattaatggccaaaagtaatgtgaaaaccaagcacttaagttggttttcctattttactgtaccacccaagaacactggaaggcagtggttctcacctggggacagttttgccccttgggaaatttggcaatgtctggaaacattttttattgtcctaactggggtgagggggatgctattggcatctagaggccaaggatgctgctaaatattctccgatgctcaggacagaccccccccaacaaagaattatttggccccaaatgtcaatagtactgccgttgtgaagctcttagaaggcattctgtgaagctctgaacagcagctaaggcatctggtgaaacctgaagtaatcacaactgtctggaaaacacaacattacacaacatttaaaatggcagacatgactccactgcccctgtgcctgccccctaatctgctataatttgatcccaagagctgaaaagcaagacccgccccgttcccccaacacacatgcgagtgtgtttgcaggcatcataacactgaagttctctgaagtattttcacagtttggtgcagctccaatttcaaagccccaaacactaagtttcttcttttgccttcaacaaaggaatttttctctgtaactctgatttccctgcccacgagcaaaggtgagtgccaagcccaaagggctcataggttaaatgactaatacttaatgagctcatattaacaacaattatgctaaccatgacacctgagtttttcacgctgttcctctggcctctgtatgaacagcgcttagttggaatgtctaatttggggtatacagtcggttctctatatccgtgggttctgcacctgtttaaccaactgtagatcaaaaatattattaaaaaaaaggatggttgtgtctgtattagacatatacagacttttcttcttgtcattccctaaacaatgcagtataacaagtatttacatagcatttacattttattaggtattacgagtaatctagggatgatttaaatacatgggaggatatatatgttatatataaatataccattttatatgagggacttgagcatccatgggttttggtatccatggggggtcctggaaccagtcctccatggataccaaggggcggctgtatttatttcccattccacatgtactcccgtgtgctgtccatgtgatctgtgaaaatttaccaccaccgcatggaccagtcccattagtccagaattcatttggaataatgagtcctaaaagttgaaaactttggctttttatattgttcttaacccttcagtcaccatcctttcttgccaaatgtgaacaactttagatgtctaaggaacctacttctccaagccacttctgccttcacatccacaatctctgcctcttatgtatccaagaaaatcagtgcatgggcatgggactcagagtagagataggtcacctttaaaccatgttttactcaataatgttctgccaactccttcatgcacctctagtctcctggaccttccaccccagctcagctgcaaagaatgtgttttcaagtggcttacttgagagtcgactggaaagttctgcagagagggttgtcatgccgctggcacgtccaggtgaaatgggcgttgctgggtgcacagaaggagaggcaatggatcccaggtattggtaggactgatcgtaggaccacggtggggatggttggatctgccttgtatctgaagagaatcagaaaggtcaattatatgtaaagtggggtgggatttaaaaaatgtcttttaataagaaatgagtggcccttgttcaaatatgtcacatacatgtatgtggcctatgtaccagggtttaataagcctactcaagtccaagtatctgcctctgttggattattttcccccaaaagagactgattcttggagattttcacctgataactattccttccaaaggttttatttaatcatgctaacaatgatgagaggaatggattacactttcaaggtagaagtattaatgtccagactgttgaactgcagcacttgagaacttcaagtatcatatgactgctgacatgatttcagctttgccaataattacaattatcatcatcagaaacattttataaactcaggggatcacctgtctgtgttcggtaagaacgtagagttttgggctttttttttatacctttacctttggcaaaaagtattccatgggctggtaaatgttttatagtaaggcgaattctctcccaaggatgacaggaaagaaggtctggctgggaaaccggcaatgaggtctaatgactagttcacaaacccagcagtagaactggccctatcaacccaagccttctgttccttttcaggacttcgagtttgcaacttttaaaagtcagagtttttagcaggtattttatagattgccattataagaggcctgggatagagaagagacaaaagtctgacttcaaaagatttagacaaagtggattttgtcaatttgactccagcgttcaaaggagtcttaattttcaaaagcatcatactgtttgcagatgaaaaggggaggaaaaccaacgctattcttaggcaaatgtgtaaggaaacttaaattggacactgtcccactagaagacagttttacatttctttggagttaaacattaattttctctttatgtcccaactttgtggacaaagataacagtgaactaccgtaactcccaagggtcttcatagccagagcttcatgatcctgcaggtagcagtgtaggaagagcagacttctttaggaaaatactgggtataagttttgtataggtcaggacataaagaaatgagctatttctgctcattataaaatattcagatctgcttcctccaggggcttttcatttccagcagttcaagtttgcctttctgtttatctctttgaagctgccacagtggataacagaatcagacatttggagacccaagtcttcctccccagtattctcctgacagcctccctccctccctcatactgattcatttctttcttttttgtgtgtgagtgaaaataactgattttttaagtttaaaaaacctggtagttcccaggcaaatagtttaacttggaatctttgaaatctaatattaaagaaaggtcttcattttattccaaattttagaggatttaaagagctggcaaggaacaaaaggagctggtccattttaaactcagcagaaaataaatgttcaaccttggctgaagctcctgtgtaatcttacagctaacagtgtttccaatgactaaaggcaaacagaaatagcagacggttcaatatccccatgctactgcaagtattttgctccaagtgaaaaaaaaatcatatacttagatattttgtataagacatgcgtatatactagatacacacatttactaagtgaatatatagtactccaatactttaatcattttaaaagcaaacaaaagaggtttcagaactgtcataaagccccccggggtgtgaactgcagtacagtaattcacgccttgttgtgtagacagcctcacacctctaaccccatgtctaaagccacactaagcataaagtactatgccatgattcatgctccgtcatgttttactgtagtgaaaaagtcgtgctaggcttttctaaactcataattaaaccatgcaaacgttgcataatatttcacagcctttaaaaaatatgctttggtaaaatgatctttatgattaaagtccaagttctatgagtttttttgttttttaaagacaggcttgcagattccacattttctgacttcacaccataacttagcttttcaggtgctggaggggaagatggcagtcaacaccctgaagcccacccaacccccacatcagttttctttcatgagaccacagtgacctgtgcttgggttcattgccagtggtgggccagaaggtggggatggtgagcctctaatgttggggttttagttgtttcctcttctacctgtgttactaatagaaaacaaaaacaaaaaaggcctgataatatggtgcattctgggtttaatattcattactgtctttggtctgacagggccaacatgaactcatgggccacccgagcactggactaataggcaggagaggtgaactcttggtctttctgtctggtgagcaactgggtgacattggattactcactgacactttcttattctcacctccgaaggaggtgatccctaaatcctttccaatggtgacagagcaggattctaattccaataggtcctacacagtatttctttgctttacttgtacattaagcagagtcagggaagaatcagatgtggggtgaagagtggtgcctgtaataataaatttgtgtattctaggaagaggaagtagaggagagtacgatgggagttatccagaaaaggccccaggctgaggaagagaaccactgtaaatcattctccagagcacagggctacttgttcttgaaagagttgcctctgataagtcaatccatctaaaagaacaaaagcttattgaacatttacagtgtgccaggaatgtgctaatttacctggcaggagagtgatgaataagaccaacatggtccctgccccacaggcacttacagtcagtgaagatcccaggatcttgtgatgcttggaaaggcatcttcctgtggcattaatcatcatactgggtgttgcttcattcatttattcattcatgtgttcatgaaattactttttcattcactcatatttccaacaaacatttttgcttcacttgggccactgttttggggactcactagtgaatggaaggttcctgccttctggaagttacagctactagggtgcccaagggctgtatctgggctaactgctagattagctgcctaatttggacttgcaaacagctgttcccaaggtagaaacaagaaccctagtggtatctattacatgcttatgttctgcctctgagaggaggagactagggaaagcaccgaactcaaatcacagacaaatttcagtttgcatcctgccttcaccataaaccaactggatgaccttaggcaggtcacttattttctctgattcatagttagaattctgacttcaaagggtaataggagtaagtgagataaactatatggaaagcaagtatcacaatttctggccatagtaaatgctcaataagtctgaataacctttatgattgtattactaaaaaggaaaagaaatccatgccaagggacttatctgatgttcattggtgagaccacacacatttgctccaggataaggctcaagtaatagtgttttgttcacagctacagtcttgacagacacactcttcaggctggagaggagctgggctcaggagattaaatggtaaaggggcaaatttccaaagattggaaatttgggattaggatggagaaggcaggaactcagtatctcaaccaactcatgtttctattaaaaaatactggattcagggccgggcgcagtggctcatacctgtaatcccagcactttgggaggccgaggcgggtggatcatgaggttaggagatcgagaccatcctcgctaacacggtgaaaccctgtctctactaaaaatacaaaaaattagccgggcatggtggcgggcgcctgtagtcccagctactcgggaggctgaggcaggagaatggcatgaacccaggaggtggagcttgcagtgagccaagatcgtgccactgcactccagcctaggtgacagagccagactccgtctcagaaaaaaaaaaataataataaataaaaaacactggattcaaaaatttaaatttgagcctttatgcatactggttttccaggctaaatgatgtctgatgcagccactttactgaggccattttgtgatgggttattttcagctttttaatcatcaataatgggtaaaacaggccttctactccttgatccccattcccttccatttgaaatgggaagttagggataaggtagagttgaggttagtggtgagctcagaggtgtacacggcatatatcacacaagaagaaaggagaatgcttttatcttttgatgcagcaatattaaaatgtctctagagtcaacaatgacccttttaaataattcatgtcagaatgtcctgttgcttctagtttcagttccaaaatttaaagagcttgagagtcatcactcttgtttttataagaaaaaatgctgaacaaactgaaaatccatgacttttcttaagtccaatggaaagctgaagttgcagggcaaactgcaaccccaaattttgagaagcaggcaaatatagagaatcatagtgaggtctgcttgctgggagcagaatttctgaattcataaactgatgagaacacttaatggtgattttgacagattgctagaggctcagtacagactagtgtgcgaataagacactcctaggggctacagtttcaggaggaagtgcactgttgtgggtttttcattcaggaactccaccagattctcacaggatccaatatattattataacagtgggttatggctgaaagagcttcaacatactgactaaggaggagttcatagagaagctcacagatgacatgggagacaaaaacaaggacgctagaggaatttgaagtctctggtaccttctgaaaacattaaatacagcccaactcttgggtacatgagaataataactcacgctaaaggcctactaagttcctattgcctgataaatcatgttaaactttcaataaaaaattacaagaaaggcaagaaaaaaacacagtctgaagagataaagcaagcatcagaaccagacccagatgtgacacagattttggaattacaagacagggaatttaacaatgattaacatgttaatggctctagtggaaaaagaagacaaggtgcaagaagagatggatgatgtaggcagggagatggaaacttttttttttttttttttgagacagtgtctcgctctgtcgcccacactggagtgcagtggcgcaatcttggcttactgcaacctccgcctcctgggttcaagtgattctcctcctcagcctcccgagtagctgggattacaggcacctgccaccacgcccagctattttttctttttttttgtaatttttggtagagacagggtttcaccatgttggctaggttggtctcgaactcctgaccccaggtgatccacccacttcggccttccaaagtgctgggattacaggcatgagccaccgtgcccagcctgaaactcttaacactcaaaagcaaattctaaaaaccaaaagcaccctaacagaaatgaggaatggcttacttagtagacagaacatgacaaagcaaagaaccaatgaacttgaagatacagaaacttaccaaacaaaaagataaagaggaaaaagaaagaacatccaagaactgtgagaaagtttcaaaagatgtaatgtgtaattggaataccagatggagaagaaaaagaaaacagtggaagaaatacttgaagtattaatggctatgaattttccaaaattaatgacagataccaaaccacagatccagaaagctcagagaacaccaagcataataaataccaaatctacacccaggcatatcatatttaaactgcaaaaaaccaaagagaagagaaaatcttgaaagaagctagagagggggaaaagccaacaccttatccatagaggaaaaaggataagaattacattatctttctcttcagaaaccatgcaaacacaaagaaaggagaatacatgaagtgttgcaacaaaaaagctaccaaactattattctgcattcagcaaaattatccttcaaattcaaagaaataaggatattttctgacaaacaaaactggaataattcattgccagctgacctgccctatgagaaatgtcaaaaagaactgcataaaaaaggaagagcattagaaaagtactatattaaggtaaaattaagttttatttttcttaactgatctgaaagataactgtttacaataatagtaacaaagtattgagtgattatagcatgtggataaatgaaataaaaggcagtaatgatataaacaggaaggaagaagtggtagttatttgatgctagatgtagattagttatacatgtacttttcaaactttagggcagtaactaaaaacatttttaaaaagaatgattaatatgctaacagaggagataaaatggaatcatataaaatgttcagttaaacctataaaaggtagaaaaagaggtgtggggggaagaatcaggtgcaacaaatataaaagttataaatatgattgatactactgcagttatattaatacttaggttaaatatgaatactctaaatgcaccaatttaaagacagagattggcagtgtggattaaagacaagacccaactacatattgtctacaagggacctattttaaataaaaatatttatacagattacaagtaaagggatggaaaaaggtacaccatgctaacactgattgaaagaaagccagagcagcgatgttaattttatacaaagctgacttcagaggaaggacaattttcagggataaagaagggaattacatgatgataatgtgggtgaattctctaagaagacagcatctttaatatatgtccacctaaaaactgagtgtcaaaaaacatgaggcaaaaactgatagaactacacggagaaataggtaaatacgctattacaattggagacttcaacaaccctctttcagtaattgatacatcaagcaggcagaaaattaagacacagttgacctaaacggcactaccagtcaacttgatctaattaacatttatggaatactctaacaacagcagaatacacattcttcagctcacatggaagattcaccaagataagccatattctgggccacaaaacacactttaagatccttaaaagtatagaaagcatacaaagtattttctcagaccacatggatttaaattaaaaagccaataatagataactggaaaatctccaaatatttggagattaaacaacatacttctacattagacatgagtcaaataaaaagtctcaagagaaattaaaaaatgttttgaactaaatgaaaatacaacttattacaatttttggatgcagatagaacagtacttagagggaaatttatagcattgaatacatatattagaaaagaaagatccagaatcagtcactgaagcttccacctcaggagactggagaaaatagcaatacagacctcaagcaagcagaagagaagaaataataaaaattagactaggaaccagtgaaattaagtacaggaaaataatagacaaaatcaatagaacaaaatatcttgttctttgaaaagttcaaaacatccctctttgtcctcgtgctccccacaggcgctgggagaagatggatagagacccctcccggccctcctctgactgtccactctagggtcttttaaacacccaccctcagaagctgggtttccaacagcaccccttgagcggtggcacccttcatcctgggcttggagaaggttatagttagaaagccccttccttgattgtgtggctgacatctttaaaacgccaggtctttcagtcatctctcagagctatttaaaaataaaagtcacatagaccacagggttctaccatctatttttgaaaaaggcaaatcagcttggtgaacatataaaccctaggggcagccctggttatttccctggaggaattttttccctccttcatcctggaggaaggtagggacgttcccagggttccctccagattcacctcagtcatggggagctggtgtaatgccctcttggagacctcagaacacacaacaggatgtgactcaggactcagagatgtgagtcagtttccagggtgatgtgttagggcgagccccagtggtggtttgcatctcactgtctgggacccctgggaagaaaggcctaggctccccttgcagacaaagggggtgaccccagatgcttcccagcatcacatctgtcagaggtgtgtgatgtcaggggcctttcagagtccctgggggtgggtgactctgctctgaaagggacatttccctgaaagttccactgtctttgagaagcagtgtttcctctggcctctgcagcagggagcaaagctccggcacagcacaagtaagaagagcagtcacctattcctactacaggtacccccaggtagcagacaccggctcagcacactgttgctatatcattgaaatcccatgataacatgagtcagtcagcaccagctctggatcctggaaaaaagggaggttgtgaaacagctccaggatttgccaaccgttcgtctctggccggctgcagacatcttggttagtcatgtgtagctcagatgcattcgttgttccagcaattactttgaagagaagcagacagaccaagccggggcagaaccctgcctgggtatgctgttttaaaggcctcaggttttgagggatcccatcctcactgccgacctgccagcctgggaggtggcaggctgcctgcgggaaggaagaagggagccctgtgtccgcctctccaccactccctgcttccgggacccgtattcatcacctcgccggggaagctttgtggctttgtggtcagggccctgtgaatcaagaatgctggttcctcacatcaggccgcccccaaccctgctggttcaccctggagtccttttcttttcaaacctctgtttcctcacctctaaaaatgggggtaaccaggctcacttgcctcacaggtgtgagagttaattaatgtttgtggggcagctttgagatccacagatgaaaggtgctctataaacgcaaaatgcaattcctcattagcactgtcagacggttcccaggggaaacagttcaccctgcaccacgaggctgctaccctcagccagatgagtctgagacacgtctgggaaagggctacgtatttaggcagagtgcttttggagggagggttcaaggataggtcactagcttccagaaaagatgggtgtttttagaacatgtctcattctcagttggcatcgtgtccctgaggcagagggagagtggccttcagtgcacacagctggagggaccatagttcagagggaacagaaggcaccttctggtttctgctgcctcctcccttgcagacagattctttctctgtactttgttaaataaacatttgttgcagacatcttttccataaggatcttctgcactgtgcactttctgcacctctgccccccgtatacaactttccaggcctgaaggagctctacagacaggttgggtacattcctgcaacaccagcacatcatggatgtttagattcttctatggccaccctatttatttccttccactcctccatgtccttcttctccaggagggtaaagacaactttctgctcccttctactcctctggcacctttgccccgcttagttccttgaaaaacatgagccagaaatattgtgttgagggctgggatatctcaagcagcctccatcctgagactggacccttggtggagaatgaggatactcactccagtaaaacaaatcactgacacctcaagtgggagctgggaagcttcaagcagaagaggcacagcatctcccaggactgcacacagctaaagaaacagaattttctgaagaacactccattgaggtggcacctgatatcaagaggattgtgcacgcttgatagtctatgcttggaaggcctgggttgggagactgtcatctccaacctgcagtccaggctgggcatggaaggccgtgctttacagccaatctccactgtgctgatgaggggccggtgggatttcctagagaggcacctgtgatatctctggctaaacagatacagttaagagctgtcgctggggcagatcatgttaagtaacatggctgagatttgccagggtccatgtaatgccttagggtgtcagcacgcaagaaaaaaaaagaagtgactttacgtctgggactgcagaggctacaaaatgatgaaccccctaacctatgagttgtcgatattggagaatacgatgcttttgagcccagctcagatggagatctgttccacacaggtgtgtgtcatgccagtttgcagcctgggcttcctctggtgactaccccatccatctctgccactgccccagctctctgtgcccaagtgctgtccctgagccagacctctggtgggagaggccgagggggcatggagcagtgatctcaaaagccttcctctctacacaaacccaaccacgggtttctcagtgggcattctcctagctgcagccttagtttttactttggcacttttttgatgttgtaaaatgttagaactgtttgaaaaattctagagtggcttgaagcccagcaagcagtctctgttgtcttctgcttccatatgacatgggccctaaggcaggcttattggattttatgccagggattctggttttaagcagcaaactctgaggcatggcattctaataaaatcagaagaaaaactcatatgaatgggggaaaaggagaattcaaaacaataaacatgaaatatggcttaacataaagatgcttttgtttgttctggccccaaacattttcaggatttgggaacctcatcccagagctgtctctctaaaagccaaaagggcttcagtaaggatacaataagggcatagttctgcagtctgagaggtaaggacagagaccctagcttggcccctcactcacagtgtgctgaagcaagtaacttaatgccttggagactcagtttccccccataaggagatgttattgcatctgtcccttagattcctgggagggtgaaatgtgcccctctgcccgatattgtcaatgcagtagctggcaccttgaaggcaggaaacagtcttctctcccctgcccttccaggaaaggataacagtgtctggagagtactgttggcttagctggttgttgctccaggtaacagaagagggagaggcttggtctcacaaagccaccagaaatgagaccttccttaggcagccagagttccaaggtgcactattccagcggggtagcatgcaccgctaggatgcaacataagcccttcctcctgcagagcagcagcctcctccttcacaaggagcaccatagccaccctgcagaacacagctgcgtcagggcctcacagcagtgttgcaccgtgccagccacaacacagattctgaaagctgcattttacaaatcgaggattcactgctctttgtcttgtgaagtgtgacccacaatgaatggcaaccgttctttctttaagagcttccattccatgctcccaatttgaaggatatcctgacaaagggaagtagaattccccaagtggaagtgcctcgtccccttcaataaacgcgagtgaaatcaaagggctgcttctgtgctctcttcctctgtttttctcatgcagtcctcccatctgactaccttgtcacagctcttcttttcctacctgcatcctcttcaccttgttttcctttcccacacatcaggccaaggcttctagaattccttgcagcaagagctggaggacagaacctcagggaactgccctgtgggaatgcttcatgtcgtcttctacacgccctctgacctggccgctgcacacaggtctttcactctatgtgattccctggctgccccttcacctccaagagctctgaacggctttacaactaggaagtctctgaatgtgcagaacaatgagtttctctttcagcagggccttgccaccccagttgtttttattcccccctctgatatgctagagataatgatagatccaggaagtatattttcttcacactaggaggggccttgccccacaactggagacatgccattcctgtctttactgtctgttctgatgggagctcctgagagatggcaggacaggcagccttcattcctaaacacagtgtcctgcagacccacccgctccagcttatttttcacagacatatttctggaggagtagtgtttattatacctctgaaactcaaggcttctccatgcacagaaatagcctccaagaaacagccctctatacccccgagaaatgcccccaagaaacctccatgcccctgagaaatagctctcttgcacctctctattttttgaaatttcttaaatatttgccaccaagcaacagagtgaataagaggctaaaatgttccctcatttggtgacaagttcctatgcaagttttgaattatttggaataattggatttctttggcttgtgagccaaggggaatcactatcactttcttctatggtatcagaaaactccctctttcttctaagttcccctgctgcagtcttctcccccaccttcatgtgagagctacacaaggggaatttgttcacttaagtttgcagccattttgcacaccccaaagagttgaccttgatgtgaactaattgggattgcagtgggttaataacacaggttggtgaggtggaatttgcagcataaaggaaacacttgaagataagagccatttgtgctttcataagctcatccctggtgctctgaacaaaggacacaaactaataaagtcagattcatctaggggcaatctacactcgctcaccccaaactctgattcagaaaggcaaatggaaatctgccagaattcttttaaactccaacacagatctcgatttaaaaaatgacacacacaaaaccgcttggtaataagcagacctctgatgatctacagatccacagcttcgtttattgacttagagaaagtaaatggcatttcaaatacaaccttcatacttcaatagatgaggtcaccctgagaaagatgatactcagcccagcagtgggaaacctccctccagagaactgctttgatttacaaggccaaggaaggctttctcatagaagccatatacttgggctaaaatggagtaattttttttaaaaaaattaaatgtagaggttgagatagcagacaactatgaaactcttgctcaacaagagggatgacctatggaagacaggaatgctaggacctacagaactgaagggtcaaaattgacttactaccaagtttagatagctaagtaactcacatttttttcaggcattgagatcctgtgtatattgactagaagatccttgtgaatttcccaattactcttaaatagcgatcatcaaacgggtgatttctcctccaggggatttctggcaatgtctggagacatttttggttgccacaactgaggaagggggagtgctactgtcatctagtacgtggaggccaggaatgctgctcaacatcctacaatgcacaggatggcccctacaacagagaatgatcctgcccacaagatcaagcgtgccctaaagtgtcaaagaaaaccttgctcagggaaagcacacactgccacaatggtttcagctaccatgatgacaagacggaagatgtgacttctagaggtgctcttcaggatcggggaaagctaacacagcattgtcccctgggcacagtacaaatgaactgaggggtatgaggagatgaggtgtgtggtgagcactttctggagcccttgtgagaatcctgggtggctgcagtcatgatgcacccagggggaaactccatccccatgtaaggtttaaggcgactgctctctcagtctcatggcctggcacccagacttagagctggcatgttgagccctgggtgagctgcaggtgtgaactaccaacaagactgctcctgagctgaccgtcggctttgccatctgggagggtacaggctagcacttgcctctcctgggcttcctgggcatgagtcacatgtaactagataatgacgcaaatcaccgtcaacattacttaaggtttcattctaatgtcttatggaatgatagagcagaaagcaacctccgagacagcagagacaaccatgccagccccatctcagagaaagctgcagtgcggaatggtgaagggactccccctattctccacagcagatagcaacagagcagggacagaccttctggctctttgtagactactgctttaactacatgatagttagaaactataaccctcccatcaatctagttaccatgtactgacagaacaaaaagacctagctaaacctcaaaaaaaaagaagtcactggaaagcacattgtccagatggttctggtggggaacacctttgcctgcttatagctctgtgagatcctgagcttggtgagatggactgggaagtcctaacttcatttatgtcttctctccaccctgaaacgatgccaaaatgaccccaaatctcaaataaaagttggtgtctgttgctgtaaatgtacaaataacccaaagtcaaaattagggatggaagttaccattccttttgccttctgtgttttgaggtggtcgtggggaggaggaaggctttcagggacaagcagacggcgacagggatcacactgtcacctgtgtgcgccttttcttctaatggccttaaactgccaagtggctgcaactgcagcgtgctgattttaaatgcttttatggaaagcaccatccccttttcgactagcatcacttaaaataatgagttagatgcacttgtattattctgtctttcaagtggattaaattcacaggctcgctctcctccagtctcgcaagctttggcctggctgtctgaacctccagattagactgatgagcacatgccagacagcaatgaaatgcaattacccaggcaaacttttgaaggatttgagccctggggcacaggctgtttacgaaagactaaaagcaccgtttgtgctgagcaggaccagttgcctccgtcttttccagttctggatcctgcctgccactggactgcaggcaggatttctgggggcctgataacatcaggcttctgtccacacctcagcacctcggggtctttgctctgtttttcaacaagaaaatgcaagtaccaacaaaagcctattataacatctccctttgtgttcactgactgactctctctctctcattgacttatttttttgtattgtgtactaccccgaaaaaatgcagccaggaatcatcctatagctgactggctgtgtaacttctttggaaatgaacaacctttccaaaaaacaggaacttcccgtcttctttgaaaaaaaaaattaaaaagcaaaccagtctcaacagcacctctgaattaccttccccttgatttgaacaaaagaggtttcagaggaacagaggtggagggaagagaaaacaaagaatgggcaaagggaaggttgacaaggagagtgaccatggtctcccctctgctgacccagacttttttttgtttgtgtgttttagacaactgtgggtgacacagaggtgttggaatggttcttcatccattcagctgaaaattaaaatgtaattctgctaggagaatgctggggaggggagggactggggaaggttccttggcttttgtagttgctgtggaggaagcaccaagtgaagccagcaggatggcagcactgaaacgctccagggctggggttgggggtcctgaagcccccgccatagggcacagggtgggtgtgggaaagaagcttccatgaggagtgggaaaatacgagggatagcaagaaaaagagtaaacttggaaggatgggtttcagaagtgctggaaccaagaacaatctagaatgcttttagagaaggaggccacacaggggcacatctgcacaccaaggaaggaggaagaacgccactgccaggagctagcagtgagtaggggttgggatccaaggaagtggtaggtaaatcatgcactcttactctggggccgagatgtcttacaaaatgtggaaagcagggtcaggattcagaaggcagcctccgatgaggctgagcagtctttagaggaaggaagatgaaaagaaagaagctgggatgagagagtttggcctcagagagggaatgggaaagggcaggggggctcactagcttagttagcagaaggctgtgaaagtgatgagggccagaaagccaagaagcatggagacttcctaggctcctcctcatcacaaacaagaagggaaatggcccaagaaagggcaggtggtgccagccaggctctccccccaggttcccagctgggatctgggaaaggagaaggaaagaatggagaaaggaaacagccaaagggccccagcagagagttggtgctatgtaaggaaagaaattgtttagggcaggatattctgaaattaacttaaaacctaaaacaaacagttttgacttgctgtcccaggagcaaggaaaaatccttcctcaacgactcatgcacccctttctctgcagctctgggctaggttcgtgggggtcctgggaaggagagagcgttcctgcccacctggaagtctccttccaacttgttgatctcagaaccctgatgtgctctggggagaagagtgtgtagcgggtgggggcacgctcagggttgcctgcctggatggcatctcggtggtggtggttgagtttttactgtcttacagcacagatggtggaaaatcatagccatgacagttggtgaagcgtcactcaaacatgcagcctatctggtaacagcagaaggcaatgtgtggggaaatgccaaagtgacagagaccaacagatcagtcaggagtcgggaagggagtcagtctgggcctcagtgaggacaaagatgttctggaggagatggggcaggtgaggtgccctgaagaatggcaggattcggggatgtggtggggaggagaggaaggaactttctgggtaggcatccagcatggaccaaagcttgtgggcaggactggtcatgggtgttcagagatcaagcaggaagatctgcagcattcacccacctcagtgtccagcctccctcctgttcgttggcttgactttttggtcatttcagagcaagaatgagcttcggaagaatggagcaccttgtggcccagaacaaggcagggaggcatggctagagaaggagacaggaaactggtggttccatggtctccataggtatcaggcctccctggcatcagctgacctgaaatagcaacacctgcttcttcggccactttcctccaaaggtgacatattcagacaggttctaccaggagtgcagggctaagggaacctatgcagtgcagtccctggactctctgaaggccaaagtatcaacagtgagcacattgggtcttcacacgtcactcaaggtcacatagaggggattcaaactcaggctggagtgtagccagaagtccaggttgcctatgctcattgctattcaccgtctgtcactctgctgcctctgaaaagttgtccttttgtttctctgggattgtcaactgatgtacatacagagatacaagggtggctgagctacaaatgatttatactacaagaaacagactggcgcaacctcatctctggtaagtcctcagtctcaaatgaaataaacagcatatggattttccctgttgtgtcgctgaggccaaattaggagtcagcaatggggcttagtgcttaaataagttgtgtatggatgagaaggatagggctgcccattccttgtttgagtgactgctggcacctaaatgcctcccggctcaggtaagagcctacctgatcacaaacagagctgggagatttgtcgagttactcaagcccccaagacatggccactacatgtgtgagattttcttagctcttctacacaggctccttactgttggctctcgcagtaaagagtggtttttgataactctgggaagctcttttcctgactcctacactatgggcctccacgtcgtgtggtcctgcaatagaaagtcatttcagggtggctttgactaagtaatgatccttcagagcgatcatcacccttgaggggtgccagcctgtacccagaaggactcctgcccggggccgcctcatgtcagggcctcttgagaactggatttgcaaagtgtctgcagacgtaagtcctggtggcctgctctgtctgctctgatcacaggggacaggaaggctgaaccaggacagaacagtttgcggtttcatcaatgaataatatggagctggggacaaagtcccctctactttctgcggctgtcactgaaatgtcagcagtggagggaaaaccagaagagaaaacctctcactgacaggcgccctcagtgtgcaaagagctcaagtttcagtgctggggtggggtgggggctgcgcccctgcctattcaccccactcctcccctgggctgctccactcccatgatgactgggaatttatcctacaacaggccacgagctccttgttctgcagtaggaaattatccttcataagagggcaactgttagtattgtttgtttgttttttaatttccaaaagtaaggagaagtttattaaataagagcgggggaagggaggagggagaaggagagggaaagggcccgagaggcagctgaccccagcatttcccgtctccccttggcttctcccatcccccttgtcccagacccccctccttctggttctgaatgtgaaaaataagcagcctgcacctcctcgactggagatgtgtctaacaaggccctcattgtctcagacaggtgtgagattggacttgattcggggccaacacctccagtaccggagccagctctgtgagccgaaaacatgcaccagccctccagtaataccactgcagccagccagagactcaacaatttaaggcttaacacacacaacataaatcagaggaggatggaccagccgaccggcagcttcttgggcagatgcctgcagactgtctgcagatcataccctgcctgtttgggttatttgagactctttttctgtaatataaagatgagaaactgggtggagcagcgtgcagaggcacacgggtgtttgtcctgtcttgttccaacagcccctctttcgcctaagtgctgttttgaagggactgctcaggacggttcacattgctacatccaaatcctaggaatgtgtccaagctggggaggaggggaaaggaaagctgagcgctctgatatgggtggtatctgtgtgaccctgggcaagtctcttaacctctctgggctcatccatctaacaaggggtctagttttctgcgattcactcatctctaatgctcagaagttcaaagtcactgtaagaagtgcccaagtcagaggaggtcattacacttgggaggaaactcacagcaccattgaatgctgtttctgagtggatccatgtctttgagcaagaaaagtctctcctcctcatacctgttctttagaaacttgtggttctcagactgctgaggcaagcccagagctcgagcccccgggagtgtggtcatgacatggcaagagccacacgctatgggaggggaagatggagatgacaggtctgcactgctagttactgccatgctccagtccctcttcctaatcaattcttagataagtttcattgaggagggaggattaccaagtcaccaagtcttagtgaagggagggggcccagaagccacccgtcaatgcgggagcccccactctggtgcctctgaaagaagggcatttggtctctgcaaattcctgtgacattccagggtagcttttggccctgccattcgtcaccctgaccctgaattcatggacaaggacgtggccgtcacagggatgccttcatctggtcccagctctctccctctcatagccgtgtactctgttgggagcaattggcatgaagtttggcagtggcatcctgaaccgggatgacaggaccatcagtcagcaccagcctcccgcccctcctggcctcggcctgccaaagcctcgtattcccacagctgtggctccagcctctgccctgtcacactcgcacacctgtttgccatcctgcttctggcccgccagcccaagccacagcccccaagcaggcttaaagggccgggcttgtgggaggaatcggcacaggatggtatttactcaaaatcacacaggacggtgaaacttggttaaaagaaatccttttgtagctgcttcattaaaaacaccaaagaggctgaccattcacatttgttgaatgcatccaattcatgcaagtaatgggacaggtcagggttcacccttgcctgctacccacgtgggctttgtgctcaggaagtgacctgtcggtctcctgtagctggttgtccccaacagggagcagggctggggtgccggctggggctgcggagggtgggcatggctttgaggaggatatcccttccttgctgggtggggctgagtagaatgggcgtggctttgaggaggatttcccttccttgctgagtggggctgaggagggtaggtgtggctttgaggaggacttcccttccttgcatgctttaagaatccctcctccagccaggcatggtggctcatgcctgtaatctcagcactttgggaggccgaggcgggcggatcacctgtggtcaggagttcgagacgagcctggccaacatgctgaaaccccatctgtactaaaaatacaaatatatatattagctgggggtggtggcagactctgtaatcccgactctgtaatcccggctactcgggaggctgaggcaggagaatcccctgaacccgggaggtagaggttgcagtgagcctgggtgacaagagtgaaacaccgtctcaaaaaaaaaaaagcatcactcctccttagcacgaattcaaccttttaaaaatggagactcagaagcagcacatgatactgaacccaaccatgggacctagcatctccctgagatggtgtatttccagaaaaaggcagtgtgacgtacagcatggttcagtgcccaagtgaatgatccacaccaaccctagagactgttctgaggctacctctgaggcagacccgaaccagccaatgggaagagcactgggccaggagccagaaaacctggatgttaggtctgcctctagttcggaaaatcactgaaactccctgggcctcgagtgtctcatgagtaaaatatagggctttgagcaaagaagtttaaggtcctttcaactttaacagtttaccatttggtcttgtggaacagtggttatgggaaggtctcctgtttgggtttatccaaggaaacaaaactcaaatgaaaataccactaaaaccaccaatacctttatccactctggggctcccgaggaataaggagacaccgggggaattatcgcagagtagctgtgtgacttggagaggaccgatgggtacaactaactggtgatacaacaatgccgccaataagagcacataaatagcaataatagtgaaaaagaataacattgaccatttattaagtattgaaagtgtaccgggatccatgctaaatatttgataaaaatatatctcaaagactttgtgaaggattaataaatacacacaatgcttcccatgtgctgtgcatcaagtgatttctgcaggctaactcatttaatcctcacaattgtcccatgtgttaggaactattattgttacgacggtttgcagagggggagaagggacacggaggaattacagacccacattctgccttcctcataacgtgcattctgagggctgtcatctttcttctgagtctcttctgaggatgagatggaaaagatagctctatcctggctggggagagggatggacagaagaactgacttctgccttaacatctccagggtgctgtgtcttcctctgagggagccatgtgtgaccagggagaaagttcgaaaataaggacaattctttatagagccgcgaatgcattcccctcccctaccccaaggcgtgaaagaatcaaatgaggaaatcaggaagagattctggaataggaataacaagatttcccttcccttccactgaattggccatcagtaattttgcacaaattcaattttgaagtcatgcttcgtaatttgtggtaaatcatattaaattaaacagatccatgtctgggcaacggcttctctcatttaggaacatatggtggctcagagcctctcacacagcagaactataaaggctccttccaaataagcagcagagtgaggggctctggggcaaccctactggttttcctgagaatgttagttaggggtgaccattaattcacgggaactgcagtatccagaatgacagaatgttagtgttgaagacaacctggttaatcacttacatgatagatgagggactgggacttggtggtaaaggaaacagtgctgggtcacgtgaaaacaaaccagacaccacaggcaggaccttccgggcaatgcttccccctaaccatgtcatgcacctacaggtgactggtggtggggattcaatgaaccagcaacattggtctgttctataaatacgagctatcattattttattactcccttcagtaaacatgtgaaccaggcaatgtccttgtcataatcttgctgtcataactgctctgtgataacccaggtatagacacaatcacaaacaaaggctatcattttaaaacggggaagtgggtgagtctcatgcttcaaaagcttctgcattcatctttaagataccagccttgttggacgaccaacagaagcgcatcttaaaactcaggcagttatggctgttccacatagcgggtgatttacaacaaagtatagatgaagattaaccggccttgagatgagagagctaaataaaccacttagtgggcagaaaggccaagtcgagcccttgagcttgtgctgacttttacagatattttaataactttatcattatataatttgctatctgatatgtgcggagagatgcactaatggagtgagagtggccacaacagtgttataatcccgcgagacttaatcaaaccaccatgttcgtgtccctcatgtgacctgcaactccaggaagtgcaatccctagtcacattatttcttcctccctttttatcttgagatgttctttaaaaaaatcccaaagcaactggacatatgtagtccttccagtgatataaagaggaactggcacagcataagctctctgggtcttggatctggctttagaatgactcaggttgaacacataaagccgtaaggtaaagaggacatcatccatagcaggaactggcaatttacagggctgggagacttaaccgtcccagacgggtgagctcctgatactcaagttagcgctgactcagcgagggccttgaggcttgactcacagatcttccctagggatgctttgcttttatgacatcaactgaaggatcctgcagtgtcctccatacttccaggaggattgagctggacattatagtggcccaagtcttattaaacggaactgatgatgttgacttacggaggctaagattcagtgacccagttcagattgtgtggaagaaccaagacggtagaggaattaagcaccatttccattcctggtgggttttttttttttttttttttttttttttttcagatggagtttcactcttgtcacccaggctagagtacaatggcctgatctcggctcactgcaacctctgcctcccaggttcaagcgattctcctgcctcagcctcccaagtagctgggattacaggtgcccgccaccacacccagctgatttttgtatttttagtagagacggggttttgccatgttggcaggctggtctcgaactcctgacctcaggtgatccacccacctcggtctcccaaagtgctgggattaccagcatgagccactgtgcctggcccctggtgtgttttaaagctcaagtttcatgccaccccataggtgttaggtgacatgagacacacaggtcagaatcgccatctcctcttccctctgcccatactgattccctccaggaaagaaagtagggaatttcatctttaagaacaagaatccccttccaaaaaggttaattcccataacaggatctacggagatcagaattggaagacacttttcaaaatcttgaaaccctattgagaaagttctaaaccctaaaaatgaccctaaggttgtatggaataatgatggtgcccaggattgtggcatcctgtgtctggaggcagtggctgtcttttctgcccaatctttcctatccatgattcagtcaacatttagtcaaacattcagtcaagcatttagtgccattgttctattttttcttaaaacagaaaatagtctattccatgccatttaggggagcgtgaactggctaaaactcaacctgaagactttccatagcttgctaatcagaaatcacctgaattagaggtggtacattcttcccctatcaattctcaggagtgcaaagagagacaaaaaataaacatggttggccaatgtttgtttttagggtgagttctatactatttttctattattattttgctttatttactgtggttggtaactgaatctctaacatcaaaacatgagatgttctgccagaaagagattacagaagaaaagcctatgaaaagaaactgggtttgtcagtgaagattttatttacaggagttttgcaatcggtatctttaatctccataacaattgggctattctactgctttgaaggcaattgttcaataatgagaaggtccctgtgaggctaaggcttggaaggaagaatgtaacagggctggtgacaattgaggcaggtgaaaccctctgcctctgtcaatttcccctaaaggtcagggtggggtgttctgagggccagagagaaataagcaaagacacaggtaatgaaagtccctccgcatcatttaaatcacaaatactggattttaaagagccctaaaataactgaattcgagtgggcctgaatttctgttccataaggcaaggaaaaatcatgtagatgagtaaaaccaactcagtctggagaactatgcctaataagaaaacccaagcagtagctttctaagtagagctgtttttcatattagcatatattgtttgttcttctctcaatacaaacttgtggtaaactttgatactacttcatgactacagtaaaagtttcttttttaaatgtccaaatttgaaagactatcttcaggcgatttgtaaatcaccatcctttagaaatgggtgtgtagtcaacaatgcctggcaatcaagtcacttttttaaaaggcagcttgcttcaaaacaacagtgacatgcctggctttgggaggtcaaattcttgagtccatcccaactgtctggctttggtcatcatgtcatcttttgttcccatttttctgttcctaccatctaagctgtcatgagcttttggaggctaggacaagaggcacctgggcctcctgtttccccatctggcactgctcccgggacacagggaagagagctctttctctatcactgtcaggacctctgattccatcggtataggtgctctagaaaatattaaggaaatatctgatctcatctaaaaaaaatcatacatttttctggctgggaaataaaaatactatgatgttgcgttcaaacaaatgatggactgaggttatagtaacacgattggggcatttgtgcatgagatgttcagttcacatttacctgtctaccatgtttgttctgggggatggacttgggagagttatctctggactcacctgctgtgcctggtcaatggtctgatgtcccctgtcttttgtacaaagatacagcagtttgaacggtggctccagaaccatttcctcacccccagaactgtgaatgtgaccttatttggaaaagggcctttgaagctataattaagtgaaggattttgagttcatcatgaattacctgggtgggtctaaatatagtaacatgtatccttagacaaaagagatgacacaaaggaggccatataaagagggaagaagaagttggaatgatacagtctgatacagtcacaagccaaggaatgccaccagtggctggaagagataaggaagtatcctcccctagaggcttcagagaatgtatggtcttgccaacactttgattttggacttctggcctccagaactaagagagaatacatttctgttgttttaagccaccaagtttgtggttatttgttaaaacagccacaggaaactaatatacttgtgctgtggtttgattatgtccctcaaaagttcacatgttggaaacttagatcccactgtggtggtgttgatgaggcctttgcagggagcaaacgggtcatgaggattctgccctcataaatggattaatgccataatcatgtgagtgggttattggtgaagtgcctttgttataaaagcaagctctcttgcacatgctttcttgtgccccttgctttctgccttgggttaatgcagcaaggaccccaccagatgccagcaccatgctcttggacttccctgcctccagaaccatatgaaataaatttcttttgttttctttctttctttttttttttttttttttttgagacagaatctcactctgtcacccaggctggagtgcagtaacatgatctcagctcactgcaacctccacctccccggctcaagcgattctcctgcctcagcctcccgggtaactaggactcaggtgtgtgccaccatgcccagctaattttttttttttgtatttttagtagagatgggggtttcaccatgttggccagcctgctctcgaactcccgacctcaagtgatctgcctgccttggcctcccaaagtggtgggattacaggcatgagccactgtgcccagctgtgaattaaatttattttctttataaattacccagtctcaggcatttaacaaaagaactaagacagaaagttggtaccaagatgtggggttgttactacaacaaatacctgaaagtgtgtaagtggctttggaactgtataaccgtgaaggctgaacaagtttggaggagcaggctagaaaaaagcctgcattgccaagaacggttctgccattaggggcaattctggtgagggctctgaaagaagaccttagaactaggggaagtctaaatcttcgtagagattacttaagtgattacttaagtgtatgtgaccagagtgctggtagaatgctggtaaaggccattctgatgaggctgcagatagaaatgaggaacaaggtattggaaactggagtaaaggccatatttataaaatataaggttgcaaagagctgggtgaaattgtgtctgtgtcctaggacttaatggaatgcagaacttaagagggatgaactaggatatttgtggaagaaatacttaagcagcaaagcattgaggctgctgtgtggctacttttaactacatatagtgagatgtgatagcaaaagaatgacttaaagatgaaatttgcaattaaaagagaagcagagtggaaagatttggaaaattcgcagcctggccatgtaaagagtgaaagtgtatttggaagagagtactaagggtgtggccaagcaaccatttgccaaagagattagtatgaatgcgaggaagccagattctgttcatcaaaacaatgggagaaagaccccgaaaagcatttcagagatcttcaagttgctcctcccatcataggcccagagctctaggagggtagaatgattttaggggacaggcctggggcacccttcatgggctcactgcccagggctgcctctagtctctgcttcctgcatcctggtgcagcacaccttggccaccccagctgtggcttcagtgggcctaggtatacctaggctgccattctgaagggcacaagcagtatgccttgatggtctctatgtggtgctaattccgtaggcatgcagaatacatgctgtggaagcatggcttcctccacctagattacgaaggatgccacagactgcctagaagctcaggccaagacctaccacaggggaataccactgcagacagtacctagcagggcaatgttgaacagaaatgtgaggttgaagctgccacaaagagtccccactaaggctgtgcctaatggagacacagaattggggctatccctgagaacccagaactgcagagccaccagtgtgcaactctagcctggtaatgctgcagacacaagacttcaacgtgagagaggtgaagtttgggctgagcccagcaaaactgtaggggcagggctgcccaaggccttgggggcctagtcttagccccattgtatccagaaggcagaacatggagtcaaaggagattattctccagttttaagacttaatattgtttaccctgttggattttgaacttatatgggaccagttacccctattttcttgcctgtttttctcttttggagtaggaatttctaccttgtgtctgtcccaccattatattttggaagtattatagtagacttgtttttgatttcacaaagctaatggaatttgctttaaatgtttccttgcatctcacccatatctggtttagacaagactttggactttcgacttttgagttaatgctggaaagagttaagactttggggaccactgggatggaataaatgtatttttaaaatgagaatcacatgaatttggggaggtcagaggtggaatgctatggtttgaatgtgtcttctcaaaagttcatatgttggaaacctggttgccatcatggcaatgttgagaggtggggcctttgggaggtgattgagtcataagggctccatcctcacaaatgaattcatgctaccattgagggagtaagttagttatcatggaggtggctttgtcataaaagtgagctctctgacagatgctctctgcccttccacctatctgccatgggatgactctcagcagatgatggcaccttgctcttggacttcccagcctccatagccatgagccgaataaacttttctttatatattacccagtctataatatataagactacgacaacttgatattattgatgttgatcataacagctaacagtttttgagtgttaaccatgggctggctctaatgtccactgctttatgtttcacagtggtcctaggatctgctagtataattattactcgtcttttgcagataagaaaactaaggctttaaaaggttaagtaacttgccaaaagtcctatagtgaatgtggtagaaactaaggtagtctgcctgttgagccctcattctttcttagccactatgatctgctatctttcttggctattagattcccagctcaagccttctgatatgtagccatcaatatcaaatacatgctccaactacaactttgctgaaactattaatcttccaaatgaaaccttttagtgcatgggtgtgctggcctacatatttacaagcataaggggaaagttcagaacatatgcagtctacagaagaaatatttcatcactaagatcaagccctgcagtgaatctctgcagtcatcccactggttttcatttcttctctctctctcccttctttcctttaattatttttatttattcctgtgaacacctgattcaggcttgttgtcggggtaagattataatgctatagacctggaaaggctctcataccctactacaccttgttaaaagctatttttaaatgaaatcattcacctgtcatgtttatagcctattatataaattaatttctcacattctgaatatgttactttgtgtaaccattaaatgaccatttatagattcacatatgaggatttctggtgtttgattgtagcctccactttcaaggtaatcaaatagtccctactccctttgttttcaaacttcaaattgctagaagagtaaggaagagagggaaggagagggagagagaaaggaaagcaatgcaatgcagttggatattttacctccaaggctggaaagaggatttatctccttctcctacaggaaggtggaaaggttttcttccttttgtctatccagatgataaagagagaatcagacggacttaaataactctatacaactgagaaacagggtcatttcagtatctcagagttttgcagacagcagcaccagaatatagtccttcctaagtaactttaattttgggggaaaataattagcaagacagaagttacttggaatactaaaaatcaagagatgatttgagaggtcagggacccctcttggccatatggaacactcaaagtgaggcacgcatactcataaaagtggattagatgttgactgggtttggatgataagcacttggtcccaatgaacttcaaaagtaggaaggcaatggccccaataaagtaaacagagtggctggtaagccttctccctgctcatataccccctctttcactcttatttagagattcattattctgagttttcttttctcccaaactttataaacaaatgcacatgtaccaaaggagacagtttattaaggtgcccaccacacagcctggccccaaaattcttcttattatcaacatctaattataatagaacatgttcaatacaagaatgccaagtgagtggatagcccaacactttttccatccctcctttggtgattgggattcttctcgacactggtcagccctgtagtaaatcgatccttgacccaagagtgcacgcccagggaacggccatcccacttgcactggctttgtagcaaggaaggtctgggtttgcgtccaagttcatcacttacaatctttgagatactgggcaatttttaacctctgaatttcgatttctctgtctataaatgataccacaggattgttgagggaatggaataatatgtacaaatgtctgacccacgtcaaaatagctcacaactggtccagttaaagagttaaatcttcttcctacatgcttatgacaaccagcatgcagaagaacaacaaaatgggcttcctagtttatctaggtttcagttttctgtaccagcatctattactccatcctcatattcccagaaaggaggaaattacgacaccttaaatgtgatacatcatatttggtcaatcaggggtgaaattttaaaatcactcactcgggttgcccaaacccatctctaggtgggagttgtgactgaacaggcatcggtaccactagctctagaatctgccctgttctatcttttgaaataaattaaaaaagaattctaagactcgatcgtagaagttaatgatggtgtcctgactgggagaaacgtgtagcccaagggtctactcatgacaaaatggctttctattctatttcatgacaaaatggctttaccagtttaagacctggtaaaataggaagttgaaataaacctcagccctttaatagttaagaccccaacaaataaacagtggtttagtggcatgacaacttgccccctctcaatctgtaccgtgcttcagataatttgagatgtctattttgagtgaccctccagcacatgtgattctaggtaagtattggtgctattctatatcagtattttcttgctgacagagtcagaggagctggcataacccttctgacaaagtcctagcaaggtagggttcctgagcctttctataaatcccggcaagctcgccaaacccccggttactgacatttctgtaaagctgaaaaacattcatgcatctggacagcaccactgtggaactactctgacaaattggatatttttctgaaaactaccactgccatttcaaagaaagccagaaacacatgctgtatttcttaaagtatcttcgtaaatataacatagaaatttcagggctgagcctggaaaataagcattttcctactgtcaagaacaaactgaaggtcttggctgaacaagacttgcatattatacctgttaactttccaatttcaagagaaaaagcccaagggtctactcaaaacatgattagcgtaaaacagcgttttcttataggaaagaaagaacaaaaggaaaaggaaaagttgtttcacatgaaaatattctggatacttattttttaaaagttgttcctaaaattttacaagtgaagtactgaatatcaaattcatattttggaaagaaagaacaccagcaatatagttcacacattctttagagtagcaaccaagcccgtaggaactctaaaagcgagttatgatttcttaaatgttgcagaagtaaaagttttcaagaggaacaaaaaaggggcgatgcttagtgttaaacctgatactctactaagcatataggtctccaaagagctgacgaatgcccatcacacggtccacaataatgcttttgcccaggagcttcagaggatgagaactcaatgtgcaacttccccccatttttttgtttttgttgttaaagaggcatatctgatgaagaaggaaatcagattagattcactcttcaccaagaaacagagcaactcaatggtgacaatatcaattttcccccatgtggctgaattttccattgcctttaaaaatgcttaagactttttgttcccatatcagcagaaaaaggcaaatcccttaatcaacctagtagtataaatggccagttaggcaacgagagactaagaaaacagtcttccttttgattttacacatgaatagatgatgtgaattagttttctgaagattatgtgaattagtttaaatgaccttaaaggcaagatgaaagaatctccttgagagttgtatcctctttggaagcaaagtattgttttgccccaagcccatctcgctcactgaacataccatttgacttaatttaccatatacgcttgtattttggaatttaaaaaaaatcaatgtacacattttaaatcattattaatgattattatgtaacaggaaaccagtggtttcatggatcctcttcctaaatacacctaaatgaacctatagatgacaggcagccccccaaaacatcaagctttaggtttctgtttgtttacaaaagggttactccacagacaggccacttagctgtgtgcatagtatcttctggaaagatttatttggaaattttccaatcaagtagaagaaccttccccagaaacctaacagtgagagctaatggcatgggctgtcaagctccatgggagacagtgggcatgccttttgagaacccatgtttttgtttgtttgtttgtttgttttttgagatggagtctcgctctgttgcccaggctggagtgcagtggtgcaatctcggcttactgcaacctccaacctcccgggttcacaccattctcctgcctcagcctcctgagtagctgggactacaggcacccgccaccatgcctgcctaattttttgtatttttagtagagttggggtttcaccatgttagccaggatggtctccatctcctgacctcgtgatccgcccgccttggcctcccaaagtgctgggattacacgtgtgagccaccgcgcccggcctgagaacccatgtttgaacccaaaatagagagctactggcctggaaacccaaaggaacagatgatatttgtacatcccacaatacaactcacatacagaaaatgcctggggaagctaattcctgctgtccgagaggggcaaagagctaccacatcgattgctggccacctgcccttttccccagatgtgttgcttatcttttccttaacaagcctgctactttgagaaagaaatattactgtaaaccatatcacacacagctgcatcctgcatggcacagagaaaagtctgcattttggatttttgaaacggtatcacagagcaaacagtcattgacgtcactggtctacagtgtaaatgaacttcttgtattatctaatttggcacagtgggccttaggcaattattgcatcttacagcgctttagtaattgccagctagccccatgggctggggggacctgcattctctattgatttgcaaataacacccttgatgtgatgacatccatacatttcaactatttcttaataataaaaaaacactagatacaaaacccacaaataatctggcaatagcgagaacttgaaacatcccatcttcactttgcttgacgtgtgtgtgtgtgtgtgtctgcgtgtgtgtcttcaagcctaatgggtaggtaaaaaaatagcatagccaaagctaactcttaaaaaattcaagagagctatctatccaatatggatatccatacccagagctcctcgtatcctctgtagcagtgcttttccttgtggggatctggttacaatgcagatctgactcggtgggtctggggtgggtggggcccaagactctgcatttccaacagctcccaggtggtgctgttggttcgaggcctttctctgagcatcaaggggaaaccccagttggtctgggaaggtgtgtgcacatgggggccagttgtgggtggtggcccaggtgcaggagaggcgggcagtgggctccatctggtacttaccctgcatctgactctgaggctgagggttaaaggcagtggagtggttcagggaggcacgagggttgggcgtgggggctgggtggtgtgggctgaccctcatggctgtgcgccgcagctgctccagttcactgagccgctcggaaaaggacaagctcccgggcttggtctgatcatctagtttctgccgatgtcctattgtggggagcagggaggggaggggatggggggagggaaggagggagggaagagatcagaaaaagtattgtggatttcctaaaactggggcttttcttgtctttcccctctctctcccctcaccccaacatagactcgctagagatatgccagctgaatttggggccactgtcctctcagcagaatgggccccctttcaccgcctcggccacagagtgctcccccagtctgggccttggcaccctccccaaccctctacacccacttccaatgggcacaactcactgagatacagaacttggcggtggtggtgatgccgggagggaaagaggcgcattaattgttggcacatggccacatgccaggggctatgctgtggcagccaggaaaggtggcctcccaggggcatcagaacggctgttccttactgcaaacccagccactggcacgttttagaggcggcaaagtgggccccgcagcttagtggtagggccccttccaagaggaaatgaggcgtggctgcaaacccacagcctctggggaggtcccatttccaggtacacgcagggcatcctcagcccctcagcccctctccctctccctctcctcacaggcttttcacaagcattccttcttccctgaagccgactcccccatgtacccctaaggaggagttgacaggaaggcctcgcctgtgtcttgtccaatattcccagcagaataggcccactggagcccagaggtagctacagcctatctggtgagcttccccagggggctcaggactggtgggatgggatgatgggcccctcagtgtctatatagggtgggatggtgggcccctcagtgtctatatagatagcaagtgtcctcatcatgctcttcaccaaaacaaccgtcaccaggaagcagcaagcagaggccactcatgggggactggggcctacggttttctcaaaatgtccttaaaccagagccagtcctgtcgtgcaaagctgaggctccaaggtagggaggtagccacaggaggcctgggccattcatttctcttttaaagacaatggcctcctgctgcttcctcagccttatggttccaataaagagtccttgatcgattgcacaacctctgttccctattgccaaatgtccccaaagccagactgagaaacagcctgcccgctgcccccataaagtgctatttcacatgccctgacccaatcctagactagaaagaggcccccttgattccactcccgcagcctggggtaagagcagaccacgagaagtgcactgtagtccagctcccaatggctacaattataaaattaaatggtataacttgcatgatggctgcaaatctccatggctggccatttcttcctgctgccaggccccttggcacagttgacattgtctcaaattccagaccagaaaaaaagggcccactatattgcagtgattttatcattaacgagacctgtttggctccaaaatgaggaaaaacacttaagcataatatttatgtagttcaaatgcaatggcccctcttgtcatgtgtcaccaaggcaaatctggactctgattcagcgctccagcccacaacaggagacttgaacgcaaacagcctgagtcacgcaggctcagcatgcatgtgggaggcctgttcttggctgcgtattttaagcaccggctttgtggatgaaaggccatggggccaggtcttgcagcaacccccatcatccctttccctcagaagtatgaaaatgtcttttttctagagcgctctgtgttggtcagccatggtgtgactcagtgcctctggatgaagccttccttagctcctccctcctcttatctctgccatagatccttggcttcctgatgatcaaactgaaaaatctgcagttttcttgcagaaaaacaaacaattccaatggaacaaccattcaaaacataataactcagccctttaacctcctaccacagtctaatgcctggcattacgagttggggtaaagaagaaggcaggaacaatgattgtggagagctctatctgcctcagaaataatgccagtcggcaaaggctgccggcaggttttgtgctcatttcaaaacttcacattcctcaggcacttagtggcatttttgaagaacactgtgtcaaggacagtgggtgacccaggagagtgatgtgagcgaggtcattctgaatacacagcacttgacgtggtagagtctacagccacagcttggaaaaacagctcttggcagttgtgtctctcttagccagcaagcgtggggacctgtgccacggagacacccaacaggaatcatcattccaggtaagccagtcctgtggtcaggcacaacgtgaggtattttttgtttgtttgtttctttgttttttattttaattagtccccctcattactatatacttagaaatgagagctttaacttgtgagcaatttctataccagctgatacctgccaaaattgtagtcatttatagagattaactgatgactgtctgctttagcagaagtgttcaggcataactctcagagaaaacaattcttcactctaagctgttttctaagccctgggagtctcagggctgagtttaatgctggaggattggggaagagcccattccactctccccacgtgtgttcctgggagtcagtaggaacgttattgccttggtaggggtcttgaccctcaggctcacaatggtgctggagagctgtgacaccaaggcacaggggaaatgagaagcattatcatattcagggtgtggtttggatgcacttacaagctagatcgaaggaacatctaattcttactttctgaaaccatcagacctcatgtgccaaatagcaatattttgcatgaaatataggaacttccgatataaactttcaagctggggaaaatgaatactttatgtcttcagtttcctgtatctgtgttcagttaaaaggctcatttgccccccgaatgttaaatagaggagtatggaaaatgtctactatccaattcacttttcttctttctcactgagtaccgggctttagagggcaacagggaattcgaccctgggtcaagcccttgggtagaaccaggatgcagctctgaacacctgcatgctggcagcttggcttcttcagcatgtttggaatcaactgtgaatgtttacagggcggtgctttaaagtagtgggcacatcaagatttcaccctgggacatcttaatcttaagcagagttgaaaaaggtcctaaattcttctagtaccattttctcatttttgaaaaaaatgaaagtacttgcttggaattttattatgtatgcagagtcataaaaatccaaaaaaggggaaaaaattgtatataataaaaataagtcaatgccgtttgcaaaattttacttcattccaaaggcattcctattgttttcggggttggctgctcattaggccatccttaaatgttatgatattttgtgacggatagtgagaccagctttcacttttctgccatacaaaataaactgagcaggtatgcatatctcgttgataaccgagctgcctttttcaagacaccattgtgatctgtggctgtaagtaacataaatgtaatatatgatcttccattaaagaaaccagataaggttaaattgccaccgtttcttggaaaattttggttagatagaataaagaattttctggcagtcaacaacatattagtctatgtttccgatatgggtttactagttttcttgatagattcttagcagaaaaatgaggaaggtatatactcagaagactgtcatgatgagccgttgagccaaatctatgcaaaagcataataccaaaaagatatatttctctctgtatatacatgtataaaattgtggttcttctaaaagcatataagaattttatatagtcaattttaaaaggatatctgtatttcagaagatgttggccagtcaattggatactcactacatgaatctggatataaaaatatggggttttcttcctttgatttgctactgttttatgacaatggaaaagaaatcaatgtgtgtagagaacagcttacttttcctggtatcacagtctaacctttaggttgcagggtcattaggatttcaaagtgacagtactgaatgtgactcttcctgaagccccttgcagatggtaaaataaatctccctaattgcaaacctaaccatatgctggctaatttaatgttgggaaatattcttcaatattatttaccataccacatgtatattatatatactatataatataaactatataatggtatatagtatgtcagtatacattctaattcatattatatatgcatgcttatatattgtccagtgctacgtaactatgggtagcctcactttcccccaccccaatttcttctcatatcgttaagctaagacaacaccacaaggttggagtacttcagaactggagaatggccacagaaatcagccttggtttttaactaatgtgtgggaagtgaggttcagagaggttatgtcatttgcccaatctcacacggccagttacaggaagagggcaggtctgaaaacacacacactctcaacacccaccgacacacacactcggaatgtacactcagtgcacctagaaattcaacacccacggacacacacactcagatatgtacactcagtgcacctagaaattcaacactcaccgacacacacactcgggatgtacactcagtgtgcctagaaattcaacacccaccgacacacacactcgggatgtacactcagtgcacctagaaatacacatttctgtgaactcaaagcgaacagggtggagaagtgcacaatgcttcatagttttagatctcagagacacgaaagcacttgaacttttgcattctgcctcaaccatctcacttctgctcccagtgtgtgtgtagaatcagaagacagccccagccacactgtgacctgcaggctgtgaggctgtgtttcacctgcttgagtgggcaatggaattacctgggcattctagtttggtaggttggtctagggtgaagggcctgagaatttggagttctaataaggtcccaggtgatgctgaggctgccgatacagggagcacgctgggaatatctgcatgagagggagagctcctcctgatactcaagcttccaatgtgcattactacttcccttctcctgcctgcttctgatttgctgtgtgctggggagaaacacgcgaactaaatatgcctgaactgtgtttagactgtgttcatgagcaatgactgacggcctccttttggtgataactatttggccgtcttttcatttttttaactcttcaatacacacagagcagctgaaaatgcccaaactctgccctgcagataggccggtgtgtgaccgtctctgtctcctacaataactgggcacattctgtcagagtcactgtcatgataatcagtctgattgctaaggtgaaccccagattctcaagtaggaagtaatttctgctgtgccatctatagaaagactttggggaatggcagggaagggttacatggaacctttattccgttccacaaatgcagcagttaagttctctgagtgcccacaggaccgggtgttaatgcagatgccacaatcctcctcccctctagagaaacaacatggtcccagggaaacgtgaatgctagagtaggcgttaagaattctccattctaaatctgcttttctaccaacctttgctgtggacaagaacaagtctcttcatcactgaggctccgtatctggaagcctggaattaagagactaagaaggattactccaagggactctaaaagcatccacaacaattacatctgctgccattatctactcaactggttctaagcacggtctttcttgaacaacttctaatgaggttacgactttcaaagttttcccttttgtcttttttcaggcagacacctggctgcgggagccactgccaagtctagctgtcaggttggtctcagagctctgtcttgatccccaccaggtcgcccagcctgcgatcccacctggcctgctctatctttctgtgtgctgggggtcagcagctttgcacgaggtgtcctaagaattcactctccctctgcctccagctgtttcatcagtgaccctttggacagttagttatgagtgaccttggacttcagtattcaaaggtgccctcctctctcccttaagccttcacagagcctttcgtgctaccctactgactgggacattccattctgctttcacccctccccctctaccatcccaaggctgagtccagagggagtgggacattaaacacaccttaaaatttgctaggaagttgtcagaggctgcacctgggaagaaagccactctgcggaacactcatccaggctctcatttcccagcttcttgtctgggttggaaaacaatgagacatctgccctgaatgcccaccttttccatcagtggcagtaggcacataagtcttaggtgagtacctgtcacccaccccgcccacactccctgtgcaggcccctgttcctctagctcatgcccctaagcctcttagaggtggatgaatcctggcaagtcccctaggatacctccacttcctaggaatcccttttacccactcagcgatttctagaggggtgatgctttagccccagagaatcaccagcaggaatagcagagcctttggtcggaaagagcttttgtactcttgtgggtggtaacaggaaagcaagcactcactgggtccacctgtgtatggggctttcctactctgggccttcccgaaccatggtcctacagtggcctctcaggtgacatgaagtacaggtcatgtcacctgaggtcaggtggcattttcttaagcctgttttctaaggcaaatgcctcctacttgaaactagaaggcagataggttgagctcccctctttgctccggcagcagtggccaccttgctcttgcccctgtgtcactgccctggggcctttgcacttactgtttcctctgctcaggaagctcttccctgagatccctgtggacctgatccctcccacccttcaagtatttgctgaaatgtcatcttctccctgaggagttcctggagatccccttttaagttgcagactatcccacatccagccagtccctagccctttggcttaggttttctccatagcacatgttaatgttatccagggtctgtctgcacccatgggactgtaaagtctacaaagacagggattttgtattttttctgcacagccatgtctccagcacctataaaaccaactggagcctaggaggctcactaatgttggctgaatgaatgaatgagtactcaggtccttcatgattggtgctgtccaatcaccctccactaggttgtgggaaagcagaaatcatttcaggtgaaggaagttgtaattaaagttttcagctgaaatgtaactacagaaaaacttcttgttgagaaaaaatacaatatcataactgagcagtttcatgagaattgtctcattagaagttgaatcagtccgggcctgatggctcatcccagcactctgggaggccgacacaggcgggtcacttgaggtcaggagttcaagaccagcctggccaacattgtgaaaccccatctccactaaaaatataaaaaaattagccaagcatggtggcgcgcacctgtagtcccagctacttgggagactgaggcaggagaatctcttgaacccaggaggtagaggctgtagtaagccaagatcgctccactgcactccagactgggtgacagagggagacctctccaaaaaaaaaaaaaaaaaaaaaaattaaatcaatcaggaaaactcatttattttcatagtgaaaaatcaaaaagaataggtcaaaggctcttttgctgagttgagagtggcactctgacataagcaaagtccaccagcttctcctgtttctttgtagtgagtaccctctcacacgcacacacagagagacatacaaaaacacagatggcacacatgcacacacatacacacatacagacatgcatggacaaacatacacacggacacagccatacacataaaaacatacagatgcagctgggcgcggtggctcatgcctgtaatcccagcactttgggaggctgaggcggacagatcatgaggtcaggagttcgagagcagcctagccagtatggtgaaaccccatctctactaaaaaatgcaaaaagtagccgggcatggtggcacgtgcctgtagtcccagttacaagtaagtggctgaggcagaagaattgctagaacccaggaggcagaagttgcaatgagccaagatcatgccagtgcactccagcctgagcgacagagcgagactctgtctcaaaaaacaaaacaaaacaaaatatagatacacatggacacacatgtataaacacacatacagacacacatggacatatacacacaaacacaggcatgcatgtaaacacatacagacacacacatacacagacacctggacacacacacagatataaaacacacatggggatacacacatataaatacacacagacacatgtacatacgtcacacagacacatatattaagacatgcacagacacacatacacatacagacacaaaccaggacagacacatatatacagacgcacacacacatatacatatatcacacagggacacacatgcatatacacacaggcagatatacagacatggggacacatatatacaaacatacacacatactgacatacacacatatacacatacatacatatacatccatcacacatccatacatccactcacacacacacaccgttctgtgatcgccctcaggacatgggccaagacaagtgtagcaagcaacagtcaatggacaggaaaggctggccaacgccaaggcaagatcaacaaccaatacaacttcaagccagagacgcacacaggcctgcccctccccagcccccctgcaccatgcgcccaagactcacgggacaaaaacccaaacaaaactctgctccctgagtccagggctcattgccacgagcagtggagtttttcgcccactcacatgagactcgggcctctcctaaaagcagagcactcaaaatctaaatctgccatccccggtcgccagggctcactgtccatttctgtctggtgactaaggaggtaacttgagctcagggcagagaagccacctgctggcttttgctcttgaccagaggtagccctctgtgggggaagtggaggcagtttcttaagaagggtgcagacagctcccaaattcaaggtttttcttcttctaccagcctataatcccaaatattagcaaccctccctaggttaaggtcttatctcaaggaaacccccagttacagcgtaactgaaaagtaaccagagagtggtaaccaccagtgacatggatttgttgatcagagtagctcctgcccagggacagactctaaagagaaggcgacttgcagaagagaaagaaagtattggtggcgggtggcgcactatggagatatgagcactgactcacagaacgctgcctggagcttctgacatggctttggagttcaggcatcagcagggctagtcctggggtagacaggcaagacctgggggccaggagaagaagatccaggaggcgcacacacactgcttgcgtgagcatgttaccagcactgaggctctccacactggcctcctaacctccctgcaggaatctcagttcccctcccgcagcagcagatctcatacataatgggcagagacactgagcatgtttggacaggaccgaggtaaaggcagggcccttccaaggttgggtgatgcctccataaatgctggacaaataaatgaatgagtgagtgagtgaatgaatgaatgagtgagcccctttcctggactagatttattctggaatgctcatccagcagtgtggaggatgatctctcctcctctgtacttctaaaaagagggaaggaaattccctcctatttctaaaagccctgccccctgggcctcggggactttcccaacagcaggggaacagcatctgactctgacgctctctcctgtcacagacgccaactgaggttctaggctggccttgcaaagcccttggacagatggctgagcaggtcctggctggtacagaaggacagggtaccctggccactcacagctcctgagtactcactagtacaaaagccaaccgcagcaagttgttttgaacagaacgttgaccctccctcacaaataaggcttccggttgtttgtgtcatgacagcctcattcaggcatcaggctcacttctatgcactgttgtccacgtgccagaagcagccacctgctgagaagggcatctgtgaggagggagacctcttctaaagttacctgaatgggcaagtggctgtttgcctagactcccacagagcacagcatggtgatgaagatgctggtcccactgtctgccaggtaacattgggagggaaagttctgtttattccaagacactagtgcctcctattcaccttggtgaccacatttgagccagttaggaaatgaaggaagggaaggttccatccttgccagggatggagacagggatggagggcaaggatggacgcccaggacagccttctgtccggcaacattccccctcctcaatcctttcccgattcgaaaggtacacaacttccccctggcctgtctaccttgagtctctgcctatggctgcctggcctggtgagaccagcctcccagctcctctgtgttacgcaggcaataggagagctgccttttcaacaactgttttgaactttcctctccttttaactccttcaacagtccctcttctgtgtgaacactctggtgtgtgaaagcaagacctcagctcagggagacagccctcataaactgccgcagattaccctgtcttttcccagccggagggggaccccgccccactcccttcccagtctcttccccacccccaacttttttttttaaccacttctgcttccttcattttctcagcagctgcagcggagagatatagtaaagctactgtataggattttgaaagcagggcctccaagagctttccaaactccacacaagccagttattctctgccttgttttctttggcttcaggttagtaacacagaatgagtcaaacagtattaactttcaatagggaagtggtgtggtcaaccaaagctgtttgcggctagattatgaagataggtagggcaggtaatgcagaatagcccataatactgtgaggaggcagaggagggaggcggccccactcagaaacactccaacaattaagtcaacagaactcacaccatctttttttagttggctgaggaattaacaccaaggtctctgaccagccagctttgggaagttggccataatggggcttggacaattgagtactttgtgggtttaaggatgtctttttttttttttttttttttcaaatgttgccaaagtcatgggaactctagttaggaagatttcccctacttagagcatgtcactctggcgtggaccttcattcatctctttccccggcctggggttgatccattctcccttcttcccccttctcctgccctgcccccaccttctcagtcacaatctttgtcttcccagtttggcaggacatcccaggggcccctgggctttccttcctgaggttagaagatggtgctttgaaagaacaattgctcctacaaccatcaaatcaaacttttagaagctgataaagaccttaaaaatcattcaatctcctcttctttctccttctgtagatgaggaatctgagggtctaagaggagacatgagctgctgagattgactgagctagcagggccagacatagactccacgggcaggcccgcagtctttccaccaggtcaggccactccctcgcccagggctcaagattccttttagagttcaacagagcagctcccgagaacagaccagccctcaagactcaaatttcagtggtttccagttctttctccctgcactcagctacctatttattttgagactggctgaatcacccgaagaatagaacgggtttctctgaagctgctcccggcagcatgtcagcaaatgaacaggacagcgagctggcctctggagccttggaagattctcacctccaagcagctgcagtttttgactcgtcctgggaaactggcactgagactcaggggtgtaacatttcacctccctgaaatcaaatccagaaatctcaggcgagcagcatatataaaaagccacaggggaaaaaaggaatacggactcagcaactcttaggtgctctgagcctcttcccaagccttctggttctgtgagcatttcattgaaagaaaatggaataacagagttttagaagaaaaactgtatttggtcttgcaagagaaaagtatattcatataaaactcagttctcaactatttgccaaggttacttcttttgtttccaacatttaaaaagggtatctagttgtaggtagagaaaacattaagatatgtgaatggaaaaaggtaaaatttctaaaagtatggattcacagtggggtctgatttaaatgtttaaattttttctctttaatttcttctcaccaatcctgaaagacacgacgagataatatctactttcaataaatcaattaattttatttaaaatccctaagattttaatatagtacatgcaaaacaataatagattttctattttttaattatctaattatatttatattatctaattgacagactacttaaaaagcacattgatatatattatctcaatgtgtcctcaagaaccctgtgcagtaggcagaactcatagtattattcccatcttatagatgacccaggggaagcttctagatgctcagagctttgcaggtcacacaacagcataggtgcttcatgttaagaagcagaactgcattttgataaaacctttaattggaaaaagatcacctctccctcaaggaagtagggcaacatggttgacagggttatgtttcaatgaggaatacatttgttgaagccagttcagtgatgcagtaattggaattaataataggtagtatggaaggaaaagagaaaaagcccttattgtactgtattgtgagggccaaatctgccaagcttttttttttcttctttttttttaagtacttggcaatggtaaatatttggcccccacttgaacagaattccatttgtttcctctcataaggtctttgggacatggtcaaggggcctacccgtctagagcatgtgctttaataatagcagctaatatttaaggaacacttctgtgcccagcacggtgctatgccctaacatgaattattttattcaatccgcacaataatccccaacagagggatatcatactcctggttttatacccaaggaggctgagggtggggaggttaatctgatcccgaaggggaggccaggctgaatcaggaagccagctctggagcttcgccatcagccactgctccagctcgcctttcaggctatctcttttaatcctcacatcccctagcaagagaggtatcatgcagtccattctacagatgggaaaactgtgaaacgcagttttagacttgaagctccaaactcctttctcgctcaccgaggctacctgagcaccctggttcactttattttttgagacagagtctcactctgtcacccaggctggagtgcagtggagcaatctcggctcacagcaacctctgcctctcgagttcaagtgattctcctgcctcagcatcccgagtagctgggattataggcgcctgccaccatgcccggctaatttttgtatttttagtagagacggggtttcaccatgttggccaggctggtctcgaactcctgacctcaggtaatcggcccacctcgggcttccaaagtgctgggattacaggcgtgagctaccgcgcccagccccctggttcacttttgaaacactgggctatgcctggcgagtagtgtccgagaggcgcgtgggacgtggctccgcatatttctcctagctctttcaaatgaatgaactggaaatatcatacaaccacttcaaaggtaagtgaaaataaggtggtaccaggaaaatattcaaagggccataaatctatgtagtatctaggaacttatttcaaatgtttactctttattttaaataatcagaatatgacttttaagccatggtgaacaaaaacaaatacaaaatcaaacaagtatcaaatgttcgacatttcagtatatggaagtacactgaaagatttcaatagcagtctgggtttttgtcaataattgctttaatggaaactaagtatatgtatatcatgaaagtaccaaaccaatgtactgcctttaaataactttctaggggtcttgagagttggcagattgattccattgtgttactttttgaaaaggcaaacagaaaagaactttgctttgggtacatatatatatatataatatatatataatatatattatatataaaatatataatatatattatatatatattatatatactatatatattatatatagtatatataatatattatatatactatatacatagtatatataatatattatactatatataatatattatatagtatatatattatatatatactatatattataatatatagtatatatataatatatattatatatatatatattagcttggctttcacctatgaatgtgaatccagaatatttggctattcatgacagcaaattttaccagtgacacggcataatttacacatagaagttgatgaaaatataccatgtgtcaatcatactataaaaaaggaatttcacatccaactaaatgtcactggcttgtgatatgtctgataatatagccataatgtacggtaatagattatacctaatttaccctttctgtattgccaacttttcataattaatactttgatagcaaaaaaaagcaaaccttctctaaaagttgcctttaaaggaaaagaatatgcgatgaacaggagaacacagaaattgcctatcagctcaaatgaatttaaatgcagatatggtgtaagggggtagcttttacttatttaagctaaactggaattattattattattattactattattattttggtggtagtagtggagttccatgagacccagtgtatcaaattcttactaatgcctttcctagttacatggcttacaggaaaaaacaacaacaacaaaaaaaactgaagcctttgagaaaactcaaggagaaatttttcaaaatgaaaaatggaaagtggctagggtatgagaaaaattctaaatctacctgaaagcacaggagttgatgtattttaatgtgctgggatgctgtgactgccaaccgcaatccatctgaaagctgtgggtccatccatccccatgggagacgtgcacccaatgacaaggcctgaccatctcagactggggctgccccatcagacccccaaaggacacaggcagcaggcggagctgccttgcacacatggaagggtctccagtgctggtcactgatttaggaaactcagtgggtggccggccatgtttatgtgcttgcaaagcttggctgcggggagagatcccaggcacgcttgggagacacactgcatttgcctagtacaagaattccgaccccaagacacctgctacattacacgtcacgtttctaggacagtgtggagacttctgcagctgtgtcatgcctctactgaacaggacccatgtgttagatcttaagcactgatgtttgatgtcacccacacgtgacttttctttctgactttttcacaaagtgcaacatttgggggcaaggccatttcacccgttagtgacttaggaacagtgcccagagtgtttccagggcccatgctatactagaaaagaaattttactgggtctcaacacaaaacgaaatccagaaaaataaatcaaaatttataaatgtttaattaaatgtaaaaaaaaaagtgtaccattatggcaacttcatgaatttttaaatttaggagccacagatcttttttggttaaagttttctcatttccagaaggatttcaagactaaatctgaattatacctgtcctcttttgagtatgtattgtgtgccaggcatggttctaagccacagaggctgctgcattcagccttccagtgatgtgacggtggtactaccaactgtccccgttttggagaggctcagtcagaccagctgctcccccaggaatcggctctcatagtgttagcaagtgccaaaatggagacctcaacccctagtcttgattacatgttggtggcagagaaggcagggcagccacttacagccagagaatttcagaacaaattagaaagccctttaaaaactttacagcaaaaaaacgacgtctatctcatgtaccacctgagtgcatgtggatttgcctgatgtgatttaggatggcactgcccagggaaggcctggaggcctcggcctctaaggggccagtttacgggaacgaacttacggctttattttgctgaccatattttgttaccctttttgcatgagaactaatttagagattatctcgtcccattgcctggttcaacaggagaggaaaatgaagacgaaagtatttaagataattgctcaagttcacacccactggcctggtggcaccagtgtgaaaacccaggtccctaaattcaggatccagaaaactttttacatgtttgaagcttaagaaacagaagcctaaatgcagacagggttttttttttcttatggcatgtcatacaatgaattctaacaaggactgcaatatattagtttagatcctgacctcactggtgtggcattcaaattagtgatatggttttgcgagggtccagacggaaagagaaattcaatgtaatggtgtaagtttcttccctcttctctgctcccacattggattgagaaggtgcctagatcatctctttgggttttcacattacctggaaggaactcttattttgttttctttctatagcaatacaaatgccatcttagaaaatctcagtggtggccaagcacagtggctcatgcctttaatcccagcactttgggaggccaaggcgggtggatcagctgaggtcaggagatggagaccatcctggctaacacagtgaaaccccatctctactaaaaatacaaaaaattagccgggcgtggtggcacacacctgtagtcccagctactcgggaggctgaggcaggaaaattgcttgaacccaggaggtggaggttgcagtgagctgagatggcgccactgcactccagcctgggcgaaagagcaagactctgtctcaaaaaacaaaacaaaacaaaacaaaacaaaacaacaaccacacacaaaaaacctcagtggtttctgtataagacaggaaaagttaccaagaatacacaggccacgccagctcactcagagctgcaccaggtgggttactgccgcttctgggacagaagcccattcccttcacggtcctcttaggttcccattcaccccaggggccctttcagaccttaacctccactctagggtcaaggaagtctgtatgcatgtaaaattcttcttcttggactggtttgatactactaaaaatattcaacagaaagacattctaaaattcgctggaaacatttaggcacgattattattaatgctttaaaaactgcctttgccaagtcatcaggtagttgaggagcttaacacagaaggaattaaaagtaccagggggaagttcccccagaactttcagcttggcctgaaatgcctttcaaagtggggaggaggggatgtgagtcacgacagcattttcctcctctttgagcctctgccttgctcctgctttaggtgggaggggaggaagaattactttctaattcctgtgtggatcaggattgcatctagaaagaactaaagtccaagtccaaatctgatgaattcaagggaagaggaattaagtagctcatcattcactacctggaaaatacgcttgaagcaattcccagtgagcaatgcgattgtggattggtaattacaatcctgagatcacagatccataaaaccatctgacattttcataatcattcaagagcaaagagtgacacatcttttcatccccccggcggctacgtgctgtgcacacgggccctccacgaaaccctttgttaaagggggacccagacttggaccactactctgcaggtcactccactttacccatctttcgtgaaggccaacaccggaagaagaggtctatgttgtacaacaccccggggtcaggtcccccttcatgccaggtccccaagtggaccctggtgacagaagcagaaccaactgctggcacctgtgaccagcatggccatggctgtgtattatgaactctggggaggtgtgggaggggagggtacttcctgcagccctgccggggaaaacactgattccctcctgtcagtacaaaaaaaatgatgaatgccaaagcaacagggctctgctttcttgaagaaaactgtatgtgacccagaactttactgataaactctcccaataaaaaatacaggaattacattaccatgaagctcaaaaagcggccagtgcagttcttaaaaacagaccctggcatcggtgcgtgccagcatctggacgccttagtttacatgctggcttactagttgcgtgactttgggcaaggtatacgatttattttttcttcaatttccctgcctgttcttttgaagattatataaattaatatgcgtgaagcactgtgaacagtgttgggcaaataacactatttaatgttagctattgctattatcgagtatttttatgattaagagaaaataacaatgtgaactaggtgttactcaatcctaagagcaattatttttaggtccattatcaccaccagtttacaggttggttccttcccttccttcccttccttccttcatttttttttttttttgagacaaggtctcactctgtcacccaggctggagtacagtggcaccatctcggctcactgcaacttccgcctcctgggttcaaccgattctcctgcctcagcctcctgaggagctgggactacaggcgtgtaccaccacaccaggccgatttttgtattttctggtagagatggggttttcctgtgttggccaggctggtctccaactcctgacctcaagtgagccgcccgcattggcctcccaaagtgctgggattacaggcgggagccactgcgcctggcccataggtacttttcatgcatttctcttcttcacttgaagcacattctccatatataaagatcctatttctcatgttcacatatataataggtttgctatacacactcaaagtcatagaagaattatactcatatgacatgatctcaaccaagtactttaaaaagtagctgagtgaagattaggccctttgatcaacctattttaactataactccctctaaaaacaaaaatcagacagaaagaaagctagtgcctcaggaagcactctacagtttgtaagtaatggctccaccttaccatctctatgaaaaaaattaaaaaattagccgggcatggtggtggatgcctataatcccaactactcaggaggctgaggcaggagactcgctagaacctggaaggcggaggttgcagtgagccaagatcgcaccactgcactccagcatgggcaacagagtgagatttcacctcaaaaaaaaaagaaaaaaaaaaagaaaaaagaaagctgcacattttaccttactccctagctgccctctaagccagtatcccagatgtcacctgatgtatggatgctagaagccccacccttaaacagaccacatcacaagactctacgttaacagcctggtcctcaaggacgggctgcccagagagcagaggcaacgctgcctccacccaaaaggaatcccgtgagctctagacatggtcatccttgcctgtgaggaggggggcagctgcagaggcctgtccttccctccaggtttgtacttcccggcatctgctgggttacacctttccaaaattacagccagctctttcacttttaaaatagaaataactatatttaattaaacaaacaaacaaaaaaatcaagagctcaagcagaacacagtcacgtgaaagactcctttaacctggggacagacagaagttatctcagaaatggccaatacgttaattaacctttttgatttttaatttagtttctcaatgttccagacgtaacaaacacctgaccagacaggtaaaggctgcccaatccataccaccaggaccagccccccaagacgggtcagttagggtccccactgctcactctcctcaacctctccttggcaaaatatcttcctccatggcattgaaccaattcctgcattgaaattatttaatgaaatctctgtagagaagatgctttgggatctcaatattagcatagagacacctaaattacagatttgtgagctgagagctggagtttttcattagatcctagaaatataaaacatacattaaaaaaacaactctcagccattcgtagtagctcatgcctgcaatcccagcactttgggaagccaaggtgggcagatcacttgaggtcaggagttcgagaccaggctggccaacatggtgaaaccccgtctctactaaaaatacaaaaattagctgggagtggttgtgggcatctgtagtcccagctcctccagaggctgaggcgggagaatcgcttgaacctgggagtggggcagaggttgcagtgagccgagattgtgccactgcaccccagcctgggcaacagagtgagactctgtctcaaaaacaaacaaacaaacaaacaaaaaactctcaaatatccttttcttgaaaaatcctttcgctctatcttttgtgcttaaggaggagacactctcagtatatcaacaagctactaagtgctctacgtgctaaccgaaaacagagcccaccttggtgctggtaagaacccattccaggcagaggataccttttgatggtgctcttgctccatgataaagttaatttttcaacaattaataatttctatattactctaagatatttcttaaaatcctatggaatatgagaaaaacaagttttgattttctaaggggcaggtccattactgtaaaagagcaagaaaccatctgaaacgaaaaacactttaaattccctttggcgtatacttttggctacagcttcaccactgaaaaccctggaagaggggagggatgcatcaagtttacccgtcggcatgaaaaacagacgagctgtggcacagcttctcattctcagtccttaacttagtcagcggaatggcaggttgaatggcagtttgtccctccaaatgccagataactgctttatttagttaagcttgcacgcatacctcaagtcaaaggctccacacctgcaatgaggcactaccatttgcccttctataatagacagtcttcgagatgagccaaatatgccagccaatcatataagccaactcctcattttaaatgtgaggataccgaggccaggtcaaagagtctataagaaagaaatagatgatgtacagacagtatggtatggatagagagatgaacagatgaatggacaggtagataaatgaaggacagcacagaagtagacatcaggaactcctcattctgttaacgcttcatcatcaactatctcttttaaagctaggcaaaccgtttcatttttctggggctattttcccttacctatggggtgatgatcctaaaggctcttctcaggcccctcctagctctcattgtctttgattttatgaaactagagaattttccaaaatgattcaatttgaccttggcaatgccagggccattttgccaggatttcccagaattcattgcaccataatcatggaggggactcgggaggtcttattcatccagagatctggcaacatctgggcatcctgatttacatgcagtgtcctctctttatgttacactggaaagcaactgtgagcaaagcttactatagaaagttcccaccctgaatgaagacgttcaaaccataagaaaccagcatactaaaattagcagtgatggcccctcttgcttcacagggcaaatagaaaagtcagcattacccaagtcaacctgggagtctgcatgcacttggcttttttctagaagtcccttgtaaaatgtgagactttctacctggggctattgcacctctatatatcatacttatacttattccacgcatttagtttttccccaggccccaaattccatttggcagggaagactgtgtaaaaatggatgcttctttggcgcaaatcccttctgtctgctcagagggtgcttctccatataacaactgttttcttaagttgtaaaacagcaggggcagagtaaactgtatatacagccagaccgttacaatcgcatagacatcttttttcccctctgactgccaattcttaaaagtcagagtcgccaccatttgttttctgaagctcaataactttgttatttctttgaatgttacaggaaatgctggcagtgaggcaaaacccagccttctttatgcatgaggaaataagagaagtagagggtatacccagggtcacctggcttcggcttcttcaggctggtcggcatttcaactgtcccagagacggctgttgcttctagttctaaatacagtggttctacagcctcctgaaggagcatttctctaagtttagtcaccctcaaagtcgattttcttatacctaacaactgcctccctcccagccaggccccttgccataattcaagcctgcttcctctttggtcctctgtggagaacaaacttgctttggtgtttatgttctgtttaatgcagggttacattaacgtaggaatgtccaggttgacattcctactctggaaacctaagaagagctcacagtcattccttagacctgtgtggtcctgtctgtgtctatggcctgcttttcactcataaagaagaatcagggtctgttatcaagtcccacagtctcccaagtctaggcatggccagaaagtctcgatcagaaaaagctgagagggccctctggggaaaaatgcagtcagatctggagggagtcaccgagcacagcaaatggaaggaagggaaaaagcagacgaggaacaccatatcctggtggcctgcccctggtgggcatggtgattatttgcagagctccatccactcaaggactttgggaaagttgatgcagcttggggaatggttccagaaggtgacccagatgccatgaggttgtggccaggaccacagggaaggctgccataaaagctgccgtgatcacaggatagcctgcagagaactaccttaaaaccccacctagaaaccaccatgcagggaaggtcatctagaggggactggagcagtagccagggatgaaagcagggatgccctactggggatcactaacatttcctgccttcattctctgcatcaggcacacagcatcatttggcttgatcttataaagaagctctcattattatccccattttacagaagaggaaagtgaggttcagcaaggctctgtagctcactgaaggcttaagaattccactggcttgcccataaagcccaaattcttaaccacttcattttacaacctgacctccctgcatcttggcttttggggacagtaggaagccctgtttttcaatatccctcactccaagaagagagtatattaattttccaccagggacctgatacggtttggagacatctggatgctgggcgggggtgctgggcagttccacagacctggaactgtaacccagcctcagatcctggggaagggtgtggttctggaaaagagcgttactctggtgtttactcaaagatagtcattaagtcactgtgaagacatcttttctgcagactaaacaacctcactcatttttttaaaagcttccctcacaggagttattttttggtactatctttctatatttactggttttccccagacattcttctaccctcccactctctatcttaaaaatgcctgtaataagattttgatctgtgccatagaaagaaaagggtcattttcatagttttcatctctggccctcatgaattaataaaaggccagcatagacggtaattactcccttgtggtccactctgaccctcagacctctttgggctgcctctgtgcctggccaatcttccatttactatttgtttctgatcctgttgaactttactgtatattgaggaagcagtccttagtttcatgctgccctgaatggttctaacatatgattcagtcagcctaatttccttttgccctctaaaaggatgcttcaaaaagagctcagtgcacagaaacaagctttgagtagcgagagtattgacaatgcaactttttggctttacgggggcctgacatccccctgggggaaaggttgaacccaaggaatctgagacatggtccctgagtataccagcctggagggtgtaccagcctggagggtgtaccagccccaagtggatgcacttacttcgaggttctcggggcccatccactgtgattttgatggctctgtggtaggtggcgacttgcggtgggtttgtgaagacagtgatggtcagagtgaagcttttccctgtggggacacgatagagaacaaaacagaatgaggttggtggcctgaacatatctgttgaataaccaatcattaatttatgctgtccagcccttcagcacaagttaccagttttgacaacactcccggaattttggctttgcttcaattctggaatacacacctatgatagttgcctaagtgtaacacttcacatagttatatggctttaatgtaatcatcaataaacaatacaagatcaagaaagattagaatttattttctgttaagtcaggatttccggaaaccatagagtcagattggcagctctccacttctggttcccaacttccctgctcccatctttcccaattatttataattcagggcaaataagagtagaagaaaccatatccatctttctcttcttactttgtacctttgaagatcaggaaagatagaatttctaagtttgaaaacaggctaaattagaatcattctgtctatatttttaaaagacgaagtctggctgattttaaatattatttgaaaatgccagatgttattagaggtactcatgggatcagtcagaataaaattgatgactcataaatggacttaagtatatgtaactgacagactgagattcaataagtactagtaataaaaaatgcacaaaatttccattacacattttacatatatttataaaaggtgagaaaatcttcattgcatagatttactaatctaaaaacatttcttgttggtaaagtgattcagaagataaatctggctagctgacctttggcaagtcactagacacctctatgttcctcagtatccttaccaggaagatggttacatgcaaattttcctaccttagagagttttaggggagattaaatgatttaccgtgagtaaccctgttaaaacagttatctggcacacggtattcaacagggtgtgtctgtgcgtgtgtgtgtgtgtgtgtgtgtatgttgtctgctttatttctcttctctgtttctcacgggtctataataggaccctaacatttgattaagtctgatgttcaatcttcctacatcaatacagtagttctttaatcaacatagtttctcctcttaatcatgtagcataaagtaaatcaaagacagatgaaaggaaaatattttcaattgtcacacatgtcttaatacaaaggaaggccacagaaaaacaaatgtcatgcgtgtcttaatacaaaggaaggccacagaaaaatgctcaatgaaaatataatctttggccacagcaagccacgattcctaatcgtgagaaatctccaccgaacactccccaaagatgtggattctatctgtattaaagtctataataaaaagagcaatagcaagtaacaattagatgatgaaggctgctctgcccattgtgcctttataactaaagtctcagctgacctgtccaataaacgaggtgaggatgcttctggggagtgacttccatggagcagagcatcagggatgccaggagactctgcctccaaatccatctttcccatcaactggcctgtccccagaacctagagacgagtcttgttggcctttggggatttgccagttttaggacatcgttcagatgttatcaggcgacactctggatgctttcctaccgtggcatctagctgaaggagaggactgggtagaagaggccttggccaggcccagcaagcagggtatgtgatgtgatgtggaggaagatgctgccgcagagggaggcaggtcctgggggcaactgcccatctcactgggcagtctctggctttccaagaacagatccaggagcaatgacagccacagacggggagcagccacatccacatgttccagagctgactaacagattgtcctacaagcctcatggtcagcctgttccctctctgtcaagaacccatgaaggttatcacctgtatcatcaagactgaactccagaacctgcttttaggatcttctcactaataagaccctgccccaagtaatttctcactcaccccctctcctccgcatacctgactcccagtgtgcaccctccgagttctacccatgagccatggcattgagatgctgaggtcttccttcctccagccacttcgccaatccaaggctccttgctgcacccttcacccgagtcttcctgcccttcagcatctggcaacgggcagtcactcagtcacttgttttccaggcagccttccttgatgactacattttgctttatggctgtttgggctgcctcataaatcatccttcacctttgattatttagggtgtcatactgaatgcagtttgcggctgtgtagacctagtctcccagaaggtggggacccttttctatatacccatgtagccctcacagaaaggtgggaaagggtgcaagtgggaaggggctttaggagagagggggtatttaaaattaaaaaaaaaaaagtcccttgaggacacaacaatagataatgccattgtcccagtcctgagtaggtctaggggtgcatgtgggtgtatgagagagagagagagagagactgaggtggttctttcagcaagagagttacaagtttggggatgcaatacaaacgattttacctctccagatctcagtttcctcatcagcaaaatgaggggggttcatgggatgcatgcaatgtccctttcaactctctgatttcatcttccaagaatgcagctggcctgagatgcccatagccatgtgcaggcgggcaggtccacgtgtgattcttctgttgcctacaactctagcacctcagtgacttcataaaaatactgtatttgtttcctggggctgctgtaataaattatcacaaactgggtggcttacaacaatagaaattaagactttcacaattctggaagtcagaagtcccaaatcaaggtggcagcagggccacactccccctgagggctctagggaggatccttgcctctttctcgcttcggatggtggccagcatttcttggcgtttcctgacttgcagctgcagcactctagcctctgcctccatcttcacatgactgtcttcctactgggtgtcccctccctcttcttagaaggacatcagtcattggacttatggcccacccaagtccagtatgactttatctcgattacacctgtaaagaccttaagccatattttaaggttctaggtggacatacactttttggagaacactatttaactcagtacaaatagcaatgtagtaagagctcccatcatggctctaccagtgacaactgctctacaggcacgcgtgtgttttaccctctggaacagtcttgctccgatagtggctctcctaccaccacgctatccacgactacccaaatgacaacaaagaatggttgcattcataatactggcatttttaagtcgtgtagaacttacaactttttaaacaccttcccatatactatttcatttggtcctcacaccaatctcatgaaataaacaagatggattttattgttcttgatgaataggtagcaaagctaaggcccagaaaggttaagtaattttcccaaagtcacacagctttgatatacagcaaaactcatatccctgagctttctactcactgttcttccggttattatccctgaggtcataaatctccacccgcaaacccaatagcaccagtacaagaaatctggactggagatactttatccacacctaccactgccccaaaaagtaaaatctgactctgtgattctaatgtaccaatggtactcaacctgggttatagctcaaaagcattttcttactgagctgcgtttgggcctctggcagttgagcactcatgacaccccatctggtaaaccacagactaacctatataatcaggagtaaaacttaatcaaagtgataatttgtgaaatgaatggtcattatctgaattctcattatttcatgcccatcttttttttttttttttttttttgagatggagtcttgcactgtctcctgggctggagtgcaatggcgtgatctcggctcactgcaacctctgcctcccgggttcaagcgattctcctgcctcagcctcccgagtagctgggattacatgtgcataccaccacacccagctaattttttgtatttttagtagagatggggtttcactatgtcagccatgctggtctcgaactcctgacattgtgatccgcccaccttggcctcccaatcatgcccttcattttaagcacagtcacaagacatttccaccgagcacacactagtaggtggggcgttttggccagtcatgtggttctccctcacaaagggctcttgtttacagctttgggtacaaggacatttgcttattatcttacagacacagtgatgacttcttcacaggtgtaggtgacatttttccacagcacgaaaactgccttacacgtcctttgtattcttccaatgagacccagcagagccttgatactgggctgcagtcagcaacgggcgcacctgacaggagccacatgctctgccctccacgtggccctgccctctctgtggccccaccccatggcggctgggacacagcccttcttggccagcatctgcagaagtaggatctgtgcctcggggcacacgtgttatgagccaaattccctcattgaaatgacctataggcctggtattttaagtacatgggtgtggagcacaaaagactctcaagtgtttctcccagcgagctgcagccggaatagtgagaaatcacaggagagcaagggagggcaggttggctaaatagcaacggccccaaaatgggcttttcaggacccagtgcaggggtggaaggatggggctgctgccgagagggccggtgtttctgttggcagcctggaggatccaaggctccctgaagcactcactggccttggtctggtgaggccagcagaggctttggtcagtgcacagatggccccagcactgatcctgtgtgtgctgctggaagtcggcagctcttggttccagagggggccaccacggggtcacagggtggcctgcatggaaggaagccaaggaaaggggtaaacaaggggtaaacaccaagtccttcctcctgctcactgaaccctgaccaccacagcagcatcagttccagccagggcttgggttccaggaggaccattagaagaccattagaagcaccaaacgacactcatactgaataagaaggtgagaacaaaaaacaacagggcagatgaggtttgtcttgatgtaggcttggaagcagtgagagagaagaattccatataaaatcccatgaaggtggaaacacagtggtgattcattcagtgtggactctcaaggcaacctacttaggttcaaaacctcgctctgccacttgctagctgtgtgacctcaggcaagttacttgacctctctggggcctcagctttgtcatctgtaaaagggggttaataacagtcattccatctcgtagcattgttctgcaggttaaatggaatgctgaatatacaagcagagcacagggaaaggtctcagtaaatgtcagtggaatgatcattaaagacatgataaaggtgattccacaaagaccagagctgtgacagatcccgtaagaaggagctggggatgaagtaggcactgacgtctgacatgaggaggggttttgtgcgtgtgtgtgtgtgtgtgtgtgtgtgtgtgtgtgtgtgtgtgtgtgttcagcaggtgatggggctgctaccaggcctaaacgcaacttgaacttcaagttcaagttcactcctgccccgccagctggcgacctttgtaaggcacaactgtgagtggctgatatgctatgtaaacaagccaggccagtgctcctcactgcaacatgtgttgtctccctcgacgccagtgtgtccatccaaatgccagggcaaaatactaactgctttatttagttgggaagaaggtcaaggggtgagtcttcctggacactcgctgccatgacacactccccagggccagtcagcggggaggccccaggtctaggcttgattagtcttgacgttggcggccctggggctggtgaactctgacagccaattgtggtcaaataaagccacggctggaacctgcagttccgcatggcccagcgcactctccacttcctcaccacatctgggaagtggctaaacctcaggattgcttcaaatgtgcacactgctccccaaagagctgagggtggcaaggagattacaaagcaaaaagacatgcagctcggggtcatttcttgcctaggtgtgaagaacatatttaaaagtgcatccaggccacatcagagcagaatcctcctataacaccccgtgtctgacgggcgagccccgactcctgttgtgactcggcctcctcaggtctagtttgcaggtatccccggtctacctgagttggctctgcagcagactctgttcctgtcactctccttagtgtaggtctgtaagcatgagtcatcttcttcttttggggacagtttcaggggatgtgaaacttgccctttgtcacgcaaaggaaggctgcagacacaaaggagccgtctgccctgggggctcagagtccttaggaaacacaatcgcaacatttttcactcttgtgtttgtctgcaggaaagccagttgtgcccagagtcttgaaacgcccaaagagtgagaaaggaaaaataaaagaaaaacatcgcagcttttaaaaaccaagagagtcagtgaaggctcaggttctgctctttgcaaattcaggaaatcccacaagatcctgaaaggttgcagggagatttctccttttacaatagatggctttgggtctaattttaattgcggataactaagtataaaaattaacgtaccctcggattccaggagtagtctgcatttggagtattttttatgaagtatttttaattttgatttctcacttttccactggaacaacctaacagccaaaattcatgcttatgctcctcttccatttccttacccaaacatttgccactatttttgacagtggagttgtataattaatttatttggggatttctggacgggatacaaatccttcaacttgcacataatttcctgattctccatgctgaattgaattaagatgtcggcgtactgtatatacttgtgtgcaaagtgcctgtatttgcagattgcttgatccaatcgcactcacatcacacatgcaaaatgcagacttgaggcctaagctactggcaccaggactaccctcaaaagtcagactgaaaatcaggtccttagaatatagaactcagttttccatggaaatggcatttgtttggaattatggattgtttgaaaaatagctgttttacttggagaaaaccgaagacatgcaaagcattttctctggagatgttctatgaaaatgagttgtttgaggacagggacagaattttattcatctttgtatcttctattctgaggcaataaagaaaagtttgataaatgaggccaggcatggtggcacatgcctgtaatcccagcactttgggaggccaagacgggaggatcactagagctcaggagttcaagaccagtctgggcagcttggtgaaaccccattgctaccaaaaatataaaaaataaaataaaataaaataaaaataaaaaataaaataaaataaattagctgggcatggtggcacacatttgcagtcccagctacttgggaggctgaggcacaagaatcacttgaacccaggaggcggaggttgcagtgagccgagatcacgccactgcactccagcctgggtgacagagtaagaccctgtctctaaaaatcaatgaatcactctgcaaactttcagtttgacagccagtcctttacaacgtcgaatttcacttggaaggcatagcttgctttttccaaggcacaggtatgctgggctcaactgcaggcaggggaaaagctcaggtttgcaaaaggagtggaggggcgggcctctttatttggcagaatatcacctatcccacaaaacaccatgatgttctcatgcaatcttgcatttcctttcctgagatttcattttccctttctaatcttccttttccttttgataccacagttccctaggatctcagctggggaaccaagttttaaccaaaacaccccaaaaccctgaattcgcagccccctggagaccaaggccacacctgctgccctgtgcttcccccaaggacagccaccagatttaccagtcttcactcatccatcaggctgtgtgtttgggctggggtcacacagggcaagtgaccaaagtgacctcctgggcctggcctcctcctgattccgatagtgcccctagccgggtgcctcaaacacacagcccaaggccacacagagctgcagctgggaggcctgaggcatggacattcttcagggaaggaaggcttggggggcgtcagctcctgctcaccagccttgcagcacttgccactgcaggtaggaagaaaggcaggtgagtgtggaggtagagagggaagagagggaagcttgaggcaagcttgaggagggagctgacttctaggtacagtgccatctaccaaatggggtccttgcaagctggatatacacatgcctggcgctgcttgaaaggagaaaggagagctttcagtctctggatgggtctctaagctccccacgcaccctccaaatgtcctttccattctttaaactgtaagccaagtatctttccacaatttgtatctggagttagttataagtggttctccatttcattaggatcagaccaaattcccaacgtggatgttaaggcaatccccgccctatctctctgtaaggctccccgccatcactccccaaccaccgccactggagcatctctcagctcccaacaggccaggtgctccttcctcactctgctttctctgctgggacatgattcttcatgcctccaccgggttagtctccttgtcacctgcaggtctcaagtgaatgacaagtggtccagggagaccctctgaaccttcaccaggttctgtacctctgagccttggctcccgccacacccatctatcatgtgttatctactcacaacagggatggcctacttaattgccatgttccttactagcccccaaggctgtgggttctctttggctgaccgtcgtatttctcatgctagcccagttcctggcacacagtaggtgcacaatgtatatctgataaatgaatgaatgaaagaaatgcccttagtaaatgaccttggggggtggggcagagggagagttctaataaaacaggaataggtactatatttccatcacagggtcaatgcccaataaaagtttgtaattatattattattacataggcttttacttgtgaatacttatggaatgcctgctgttatctcatgcactctcattttagtaggcccttagcaggaccaaggaatataaattccttgccatcgaggagtgggccctgaaaaacagcatcattcccaacttttcaaattcagcaagacccatgctgcctctggcttgctctctcccctcctccctcagggattctcgctgtagaaggaagaacatcatcaagaggggccctagctcttcttcctaagtatagttacatacacaccatctcgcttttatcatcctaacatagatgatataagtcatagatgaaaggcactcttaaacctattgaacacagatggggagactgaggctggcacatctgagtcctacaggtgtgccctcttctcatattacattatgctacttttctaggactcacagaatcatcgctaatagatgtgtgtgttttctatgtcatcattacgaatcaaaggaatattaaataggacacaatgggttcggtgtaatctagagttcagggatttggccagaatgcaagataatagtgtagtaagaacccttccaagtgacagccagatgaaccagtgctgagtttatacgtggccaaaagagaaaaatatgcatggatgttcacttgcagtttatgaaaatgctgagacacaaccttaagaatggcttccagcggaacatccggaagtcctcaagtagtccaaggcgagctgccgtggcactgctacaaaaccccttcaacttgggtggaggcagcaatgatcactcaggaagaatgtgatgctgccaggtgccagcctgtgtaacccagcgacaggacaaagggattattctgcttcattattaaaatgaagtgtttactgttaaaatacgattgggaattaaaaggggcacatatgaatcataaatatttgcatgccattaatgtttggacaaaagagttggaaaggctgagttgggagaacttcttttcccatgaaaagcagtgcttcaaattacagtacatatttaatttcgtttctcctattgctaacaggaatctcagggcctgccgcatataaccctttcacgaccacagaaccgtatggggccctgaaataaggataaggattgtgtttcctccttggaagctcacccatttagacaaacaaaaaaagcagacctctggttgttgttgctgtttgctgttgtttgctatgcactcacagagtccccattgtctgccccatggtgttggtgtcactgcaaaaagtaacaactcctaacctatgtcttgtctcaggtaatcaatcctcattgtccctctgtcttcccacagacaagggcaaaatcaggcttagacaggtcaagtagcttgttcaaggacagatagctccaagccagtggttctcaaccaggggcgatttgcccccaggggacatgacgcaatggcttcagagatttctggttgtcacaaccaggagggtgggtgctagtagcccctgagtagaggccaggggtgctgttaaatgttcaaccatgcacaggaaagccactcacagcaaagaataactggccctaaatgtcagcaacacccaagttgaaacacagtggggaagccagtaaagtccacgtgctgaccactaggctgtactgcctaacatcaaaacagtcctgggcccagcacagtggctcatgcctgtaatcccagcactttgggaggccgaggcaggcagatcacgaggtcaagagatcgagaccatcctggccagcgtgatgaaaccccgtctctatgaaaaatacaaaaattatccaggcgtggtggtgcaagcctgtaatcccagctacttgggaggctgaggcaggaggattgcttgaacacaggaggcggaggctgcagtgagctgagatcacgacactgcattccagcctggtgacagggcgagactccatctcaaaaaaaaacaaaaacaaaaaaacaaacagtcctgaacagtcattcattcacagaccatgtatcaggcatcatctaatgtcactcatgataccacctggagctttctagttaaaggctggatctcttgattttggaaaattcctgtgagcccacttcctcggggctcctgagcacatcttcctttccacagtgcttgggtctccgttcctacacacacccttgcatgccacagctgttttcaagctttttccccagtgaccttctctctagagcacacctacagcaactcgtgagctctgtgcagtccctggctcagacaccgtccacgaactcccatttggatagttaatgcttactagtcacagattacatgacacacaagtgatctctgtcgaatctaggagcgttgctctactgtagggagcttaaaggaagcagatgtatacacggagaaggaaaattaggcgtgagggtccccatgcagcacaaaagcaaggaaacggacaaacaaacaaagcagacacagcctgacctattccagaaactcaacctgcagcaggctctaccttgatgcactgggaacacctaggggagtctccctacggatttttgttttcaaatcatcgtgccctgaatctcagtgtaaaaaccggtgatggcaaaactgacatgctggggcaggtgggataaagctccagaggaacccagccatctgtctgcgggtggcatctgcaagcccatcctgtgggcggcaaacccacaaaccttggtcctgtctcccctcctgccacgtagtgccttcatttttatttagggtatgcagactgagccattttggtgtctgggagttgtctgtcagtgacacacaccaagaccttgcttttatcacttttttttttttttttagacggagtcttgctctgtcacccaggctggagcgcagtggcataatctcggctcactgcaacctccgcctccctggttcaagcaattttcctgcctcagccttcagagcagctgggattacaggtatgtgccaccactcctggctaatttttgtatttttagtagagatggggtttcaccacgttggccaagctggtctcaaactcctgacctcagatgatcctcctgccttggcctcctaaagtgctgggattacaggtgtgagccagcatgcccggctctttatcacttttttaatatgagtggacactgtccactgacatcaattcccattcctagatcagtggctccatggactctctgctgaagtattcagggaaaagcagtgagcctctggcagagggcttcctagtttctgcagtcctcgtggacctcacctgtgtgacattcatgagggggtggctacagtggggagccttctcggagaagctgccctgctgtgtgtaccacccccacctgcagccactcctccagccactgcacatccctgacccaggatagcaggcagggtcagtggcgccagggggatggtgcaattctatgcatacagaacactgctgttttccctttaaaaaaaacttttaatattcagtgatgttctctattttttattctgtgcaatgttttaaaaataagtttttcataaaatttaaaataagtttttcatacattttgataagtttgtagggaggcagaatgtcagaataaaaggggcaagggaaacattttacaacctatgcatgatcagggcgagatcacgcatgactggagctagatgagtttctcaatctcagcacaactgacatttgggtctttgttggggaggctgtcaggttcatggtaggacgtttagtagatccctggcctctacttactagatgccaccggcactccccaacccaatacacgaccaccaaaaatgtctgcagatattgccaaatgtcttctgggagtcaaatcaccccagctgggaaacactgagcaagattatgatcaaaattgataagcagggagacaagatactgataataaactgcccagtggtttcagatagaataatgaaggcaggacatttgtcctaggtactagagacacaccatttaaagaggcagacaaagccttattatgatgtgagttagactagctccttactaattatagatagatagaaagatagatgattaatactgactatcctctatacaatagtttcaaatagaatgaaggaaaaaaatctgtaaagaccccaacccaatgccttgagcaaactggagtgtttccacctccagagatctgatgagcacacagatgaccaattatgctcaatctgcccatattcctgtgatttaccttggtttgcatacggtgactcaattagggccatacaccaccccagagtgctggccagccctcctattaactggacaggcacgtccttgggataggtgatgggggaggtggggtagttctgcagatggccctgcccatacattcttaatgatggtcttaaatctcaaggtaaaagcccaaattaatctaagttgagaaataaacaggaaatgtacttacatcttctttgagaaaaacacagtttaaatggctcctaaatgaatgcttcctcactaaggaaatcagaggaaacgcattttcagtctagcagcagaatggccgtgagcctctcaaaggaagttgctgggattcctctatggacctcaactgcctgacaccttcattggagaacgttcggtgatgtcaaatggagctcctgaatgggacatgctgcccaatatagactaacagggactgggcaatgtactggaatcccaaatcagtgcagtgcaaactgaatgccgtcgattgctctgtcttcaacagagatcaaaatacatctccgttgaatgtaggactcacagcagaaccaatgatggagtatgcgcgctgcctgaagtccaggaatgcatgtttataaatacagacgttgaagtgctgcgatctgtccccatgccccgccagggagccgacaaaacgagcgcatgtcatagtattcataggcagctcattaaatccacactgctcacttattaatttccattaattgctttatttgggctttagatgagaagatgttattagcatgaatttagtcctcaaagataatttggcccaagaagtctctcaatggaagtatggatattctcattctctctctctctctctctctcccccttgcacacacgcacacacacacgcacacacactccactggctaagaatcaatgaagccttcaaaagcatacactctccccatattgacagtatatgattattcataaacatctctttactgatctgaacttgtgtcataatcatctacagaaagaaaacagccttaagacagtacaccggccaggtacggtggctcacgactgtaatcccagcactttgggaggccaaggcaggtggaccacccgagatcaggagttcaagaccagcccagtcaacatggtgaaacctcgtctctactaaaaatacaaaattagccaggcgtggtggtggatgcctgtaatccccagctacttgggaggccgaggtaggagaatcgcttgaacctgggaggtggaggttgcagtgagctgagatcacaccactgcactccagcctaggcaacaagagggaaactctgtctcaaaaaaaaaaaaaaaaaaaaaaaaagacagtacaccatctctccttgtcaacaagtaatttttccttaaaaaaaaaacaacaaaaaaaccagaaacacagaatatgttcttctttagccaaccttctccaccctctcttgccccttgccaaccagcacaaaaaagaaaatacaaaactgatttattagaaccagagcagggttgcagccgttggctggatcactgtttatgtctataatgcttgttgctgaaacaggaagctctaaaaatcactcaaccattatttctcttgcaggcactttctgattgatagtcttctgtcccgaccaaaaagaaatgcctccaccaaacacaagccggctggcaaggaaggggttgagggtgggtggagagaagtacagcttctgcccatcaaactataaaatattgttcatacaaataacctcaatttaaaaaagctgtgtgacgccatcagcaatgcctgacacttcacaaaatcagcaagaaaactatgaagggatcaactgcgaaactgcctgttgcaagcacaagcagttttcaagaaagcttttcctgctggtccttgccatgactgggccaccccaggctttaagcagggcagggagcaacttgctttaggaaagtgttgctatccttttattggcaaatgtgaaaccgaaatgagaaacttggtctctagagatgaattctacatcagatcatggaggcaagcttttgacctgcccgtcgaaaagcagcatttgttagggctggttgaggcttggtatatcagagactgggtctttattcatctatatttgcttgcaatgagatctgaatacagatttcagtatatatattattttaaagtgtagatcagtatgtaacagaagaaagtgggaaaatgggagagttgattttaatataactcatgtcttttccttatattctctccaggagatctgactgccagtttataccatgaacattacccgtgaaacaactctggggtggtcagatgaatttttccttcttctattatatgaatctgttaatagaatagagaaggactgggatcctacgataatactgcgagtcattcagatcatctcttggtaacaaccgctacataaagccaagccatgtctctttgtttagaatatcagtaccgtttatccttccctaaatgtaccttcccttcctcttgaccacagtcttccactcacctgaagggcaacctcccacactttagcccaaataatgtagaataatttaagaatgaaaatgccttaagcaactaacattacacaaatatgcaataacccagattgtgacaggataaatattatgtctgggaagatattcacagcaagaacataccgaaggaatttcattgtataaatgtgttgggaaaggatactattttgaaagtgggcaagattaaagctgccagggaggtcaatgtaaacacaaattccgccaagaaactcaacgccatcctgacaggccacagaacacttggccttacagggctgggtgtggacacagtacgagggaagcgactgtcctttcaatgacagaataggccccctcccctttacccgtgatgatatgtgggcatacctgatggccatccaaaggcctggccagtggtttcaaggagatctactttcttaattagacaaaccagaccccggcgataacaaaaacacaggtgttaccaaaacagcacaggttcaagaaaatgtctagctcatttgtacatgtatttattcattttcaggtgtctactatatgcggcatagggctaagctggccctccatgatcaatgcaaagttccaaattcacaaatttttggcctagggtctgtggatccccagaaggtccataaatgagttctggtagcctagaaactgaaatgatatacgtaattctgtgtgtaagtgaacacgtgcattttttttttgtccttggaaaaagccttccaaaggattttcaaaagtatctatgatgttccccaaagattaaaaatcatattctaagaaaaaactagaaagaaatgtgcagtagaccatctttcctcctgcagcaacaatgcagctgataaagcagctggagagatttcttctttggttctgaaatgaaattactaaagctgtatttcctgattgatcagttattctctgactgattaaatactccaactgggatgaagcagtcacagatttcattgctaaaatttctttttcttttttctttttttagatggagttttgctcttgttgcccagactggagtgcagtggcgcaacctcggctcactgcaacctctacctcctgggttcaagcgattctcctgcctcatcctcctgagtagctgggattacaggcgcccgccaccacacctggctaattttttgtatttttagtagagatggcggtgtcaccatgttggccaggctggtcttgaactcctgacctcaggtgatccacccacctcggcctcccaaagtgctgggattacaggtgtgagccactgtgcccggataccaattgctaaaatttcttaaatttctctcagctgaagccatgatacactttcttgtcattctaaaggtggcaggtgatgtagcacttgcctcaactgcagatgtaaactgatataagctgctcagtgaattcgtttcacataagagaattccttttgaccctgaacttcaattttttgggggtgtcatggagtcccagtccatttggctaaaatgtgaattattctgaacaataacctctgtgctcacatgacctctggagttcagcccggtccccagagctccctaaccctcatctcctgggagctgctatctcttcctcctttgtaaaggagcggtcgatttacatggagatactgaatcaaagagagaaacattccaagggtgagatacactctgaaccaagatttaaactgccaaggagaaaaaggagggaatggaagaaaagagagaaggttcaggcttctacagggccagtgtagccagcgaggccatcaaagccggacaggcaggttttcccagttacggaatgaacccgaggttaggagctgtgatcctggatggcagccagcgcccagatagattcgttttgtagaacagagaaaaacccttccatgttcaacctctggcagtttctatgaggtttacaatccccatggactggcagctggtcacagaaagagaacttctttctctacctttcattttgcaccacttactaggccccttggagaatccatcagactggtggcttttgacagaattcaaaattggcactgaaagtttggatgagccaagagccagggccttctgagccatggcgtggtgtgttcatgccaagggtatattttcaagcacattttcaaaaacagaaaatgagacagttgtcttaagatcacttaataaaacgtaatgaaactgttaaaggtaagattcagtgaggaagattaagactaattgttaaaattagtcagaatgatctgctctcttcctaatgggaagcaaattgcaaaaaaaaaaaaaaagaagaagaaggaaaaagaaagaaaaaaatctggcaggctttggtgttgacacttacacttgaaagagaaaaatcaagttatattttatgactatggaaagaaattatgacagagtcaaatcgggccttcagacagctcatttacttttgtagcgctgactaaaaaaaaaaaaaaaaatatatatatatatatacacacacacatatatatatacatctcaagaccaacaatattcatatccacagtaattacaattgggtcaaatgttccattagggtttccgtattttttattgcttattatcactggtgggaaggagagtctgttcaaaatattgtctgtttatggcatttcaattaattttctcattccagagtatgggaagacagcccagccttggttgcagctattttactttttggggtttatgcaaactcaagggcatactggcacgaatcctgcagccaaatgcaaacactccacaccttggggaaacagttcactgttacccaagtaaacacaagcacctattagtcacccactcaaaacagaaatggtcaatgagggatgcaagatcagccatcaatgccagaaaagaaagcacactgctttcaaaatctcatttttttattatcactggtttactgtgcattgccggaaagccactactgaacttcttgtgggaaaatgtcactggcacggatcactaaatagtttttaaaacttttatgaccaaaacctaacttgaagacccacacagatgcatagtatgatgataacactttctctagaaaagcaattcaatgatacttagctattgattcctaacagcagaaatccacaagaactgaattaagagagttagctaggccgatgggcatggaccaggctgtggggcctttgttttttattggcttctcacccactctgccagctactcatccgaagcctttaagatgttttctagacacacatctctgaatcataatgcaaattccatttactgaaaggtggggacttttaatacaacaagtgaacccatttaatgacttatgcttttatatcttatagcatcactcatgctttcaaaaagtggatataattttctttgcattaccctattattaatatagtactatgaatatatattttcaatcacattatataaattttttattttctccagctatgattctattatgaaaatgctccagatagctaggatagcaaaaataatcaccaaaataatcaactcacatttacccctttctcctttctgactaatcaaattctctgagaactgagattttcttgtttttaaatgcctttttaaagagtaataatttctcttattttaaatgttgtttgattggtgcttccatttttttcaatacgagaactattactgttatttaggtatttaccataagtctttttattatacttgaaataacttatttgtaagcttaatcggtactatattacaaaaaatgagtttaaaaaactatcttacctccctcaactaaacttttactacttgttgctatttataaaatatgatttggttcttacaatgtaaagaaaacataatacttgaaaataattggaaaccagaaaaaattacaataagccaagattcctatttctgctctaatgctttgataatgagttaaaggcaaggaaaaataaaatcacacatggagctgaagtaatgcaacaatttcttggataatccaatctctaatattattagtatctaaaatgctaaccaggcccaacccctcctcctaaataaggcattgaaaagaaatacaacaggaagatcatactgccatcaatggtactaacattatttcttcatgtctttttctaaaaaggtaagcttgcttgaaaccatgtttcaacatcatacactagaaatccctaaaattattagaagtggtcattcgaaactctgtcacttttcacagatagcccacagatcatacgtcaacagtttccattaaatagcttttgtattgttatccaagagagaatcctcattgtaattgtataatcctagtttcattaaagtcagttttatattttttgcattttagtaaaaatctcaggcgtttctttgaaattcacaattcctacgttgcatgttccaaatcagtcttaaatccactcagtaacataaagcaataatatagagattctgctaaaaatattaaacttcaaataaatatttttaagagcttgacatagcaataagaatgttaagacagaccgagtttctagggattccatcacagaaatcactagaattttgaaatgtgggtttgttgccatgaaacgtgtttcaagcatagttttgacagataacgtacctcttccacttcgaccgacaaacctgaggtcattaaatcttgcaacctggttcttcatggctgcggtagcatttctcagctcagccgagtagttttcatcattgccagccatcacagtgaccagagtgccatctggaacatcccctagggccaccacctaaacaccagtcaaaggacaaatgcagacatcagggatgttatacatacacttttagggcatttgtgtagtgattattctaaaattaaatgtatattcaatgatttctttttaggttgcagaggaatagcaatgataacttaagcaaaacaacagaaaagttataaagagaagacacttttttattatattttaggttggtgcaaaagtaattgcagtgtttgcaatttttaactccaaaaactgcagttacatttgcaccaacctaatacattatgtataactatatgtaaattttcaaatagtgacacatatactaaatttacctcataaagccatagtaggtcacatagcacagttggaacaagactaaccatagcaagatatcaaggattttgagtagctatgccgtctcctgaatacaagcatctcttcttaatttctcccgtttgagaaacagaacatcctgtgtttgtaagtttataatccaacccatcttttacttgctcagacctccactaacaggctgaacaaggtgcagactttacttttagaaaataaaacaaaacaaaaaaacacaaaaaaacccaatttctgctaaaagtagatttcatcttgctgacgattcttaagtaacttaaactgtccctctacagttcatctttgatacctcctactcatcgctattatcttgagttttactagcaatgaattctagcacacaagaaaaaaaaatcagaaatgcacccttcgtttactaattacaaaatcaacagacctcagaaagacgggacattcacttctatgcactcccctcaattcaggggtggaattgggttgcatttttgtatctgtgagtctcagcgtgtgtaaactcatgtcctcacagatgcctgaggttttctgctagcccagctgatcttgaccaggaatttatttaatgtaactgagtaagtatgaagtcttatcagggctattggagaaaactggtagataaatgtttttatactcaggtaattaagaaaatgaattccaaagtaaaatactctgaaaagcatgacctaaagatactttgtacaatagcatcaatttcttggctatcatttaggccttctagaaactattttcttggtctagacatttactattggctgtatttcctttgtttctatttttcaaagcagtcatacaacttcaaatcgaaatgccccaagctgtatttattctgatcatttctgacattctttacggtaaagtcagtagtgacatttatattactcattccaattacatcatcatttttggttgctgtttttgaattggtaacagtaaagcattccttaatctagtgttatcactccttcctctgcctcctacttcccaatttttaccttaataactgctacataattttttgtagtatatattttcaggcctctttttctatatgtaaaaaaggctgccatagactcacttgtatgatatcgaagtcatgtttctcaagattcccattttcatgatctgcttagccatcaccctttccctgtggcctccagatgactatctattgtttttattcattagaactgcttcagtccttgtggcacagaacacgaactaactcactatgagagatgaacatacttccaaccccaagactacaccaggataatctagtctcatagaagcagggaggcattttcctctattttatccaacttgcactgccaaacaaggtctgggccttttctctctttttaatcctttcattccaattgttggacatgttttccatataggagattttaaaactctgctatttattccccaagcaccctctaattagctatttagttcccattataagtgtgtttgttgccatttaattaagagcagtgatacgacaattccctttttgttttaaaaagatatcacggaaataaatctccctgatcagttatttggttattgctactgttttttttttttttctattcccgaaaaatgggcttgctttattttgctctttttagtctctcacaacaaattttcccctttttttcatgattttcacttcccgttgtaaagttagctcacagtgttgaaatgccctctttgaacacatatttttacttcctcatcctcctctccctgtggtaacccaggcttctctattgtaactcaacattcagcaggtatacagagactgcctccactacgtgggtttcaaactgaataactcattgttgggtctggatctgtaaaaaggtgaaaataaataaatcttcttttataactacaggaatgtattctgaattatctgcctcctactgctgttcccctcacagtgctccaagcctgtgcctctctcatctttccaatactatcctcattggtaatttggcaaattcaggagaccttcgccaagtcgaaacaaacatagaataaaattatcatggaggctaaataagaaaaggctgttgatgttggaacttaagaagaaaaaaattagaagtttaactcccactcctctttttttttaaatgcagcagaatcaaccatatttgggcacctacatatcattcacttggccttgtattgatctctgagggtttttttttggtggaggcgggtgggtaaaggggaactagtaaatccagggcaattcattaatactgtatatcgtccaattgttaacaagcatacttaagccaggtttaaaaagtttctttttaattcaaaactaacatgcgtgctaatttgatacaggttttgtcactgatgggcaatatggagagaatgtaaaaatatctaacttcaaacagaaaaaagaaacaactggaatgaaaagctataaacaataggtaaggaaacacaaacatttacattttaacacagaccaaacaggcaagaagggacttgctggccaaagatatctcatattttgttttacttctctgtttttaaagtatcaggaagttgggccaaatatcaactctcttctatattacatggacctcccaatactgttcttggctagcctgttcacggtccaaactggcattttaaaccaattctaattaggttgaaattacagttacaattcatttacttcaaatccgttaaccttccagtgttgcaaagaaggctgtggagtggaacacagaattcagctgagatgatatttaaggcatagctagggactgtgatcttgccgacaaaaatattacttatttcctttttatgaaaagaatattaccatcagaatccaagacctccgaacttccctgctgaaggcacgtttacgtctttggactctggtgtaccagggcctgaacaagctataacaccatggtattaccaaatacatcctaagtcatcaaaacagctttttaggctaattctgtaagtacagcaaaacacacagcaaacttaaggttttcttagtagtaaaaaacatgtatctctcatactgtaaaaaataaaggtgttccatgggagggaaggagtagggggagaacaggttggggctcaaaataagcaagtagggttattgtaatctattttaaagaaaattcataattttaaatctctctttagttcagaagattgacgtagaggatttacctacagaacttcaggagattcctaagaaggccttcagtgatcttttcatcaatatcatcaggccttatcattgtttcacatttgcttctctttaccatagggaatataataattatttactggttaacttcctagggagattgcctgcggcttatttaagatccaaattttaaagtaataatttctgttgaagctgcttgtgaggtggttgggtgggcagatagagtgaagccagggacacacactaaatgagcccgggatgtaggcaggttttgatgttttgcttgcttttatccctaacattttatcccttcacgtttactgtctcactgaacattttgtctactcttctagttatgcagtgagcaggtctcctccaggaagaagcctctttttatgaggattggggtggtgacagacaataatcaaatggtctgatttctctgctatcctttcctttcccctaaatgttctcaggggatctgcttgaacttttttcaagagctctgtatttggatttttagtagcctatagattatcactcaataaaacaaattaattgtttttaagtgaattgccaaaagtcattttaaaaaggaaactctatggttattatggtttctgctagaaagaattctgacagctcataaaagcaatatgtataatttttcattttttagaagaaaataaatactttcatgtaatggcttgagactctgaattgctccaattcctgaagattatttattaatcatttagtcttttaatatatttgagtgtgggttccctggcagaggagggagttcagaagagaccctgatttcccccccaaaaggaagccacaaatctcttagagccctagtgcattggggcagccaggttttaatggcctttggtggttatcagcccgtcttgcctctgctctttatctgatagtgaccccatggcccaaccctgttgggtcccctctcaatgcgggtgccctaaagagtcatcgctgagtccatttaggcaaagggttagaatgatttaaaagtaaaatggtctcccaaacccaaatctaagtaaacggagggagggaaaaaagagtcaagcaagccaccacgttccttcgttccttctcctcatttccacccccactaaaaaacaaaacaaacaaaaaaaactgcttttagaaaagtgagtggaaaaagaggccaatctatagacacagccaactgcaaatttcgttttgttttagaaatcacaatctaagtgtggaaactgtataaagcttaaaaataaccgcaacaatacttttttaaaaagtgaatattcgtcgttgtaataagatcaagacccagctgaggcttggaactataaaaagcttatattaaattaatctccctttaaaggggacaattatttaaactttttttttagtagcttatctttacacttggaaccacctgccttgattcgccctttaaacgaacaggaaatgacccgcactgattttacttagtcgcatcttttcaaacccaccaaagacaaaacagaatctccactgcagaaattaaattcctactgcttgctgctagtgtagtagggtgattgtttagaaacgcctggggttgttttcatacccctgttgaaggtcaaggtttttaaaggcagctcaaagctttggggatgatcaggggtgaaaagtgaagggagatctttggagccgccgcgctgaagtctccggctacgcgccgccccctcctctagcaggaaagcgggccgctgggacccctggctctccgaaaacagcctcgtcacctttcgctacccctggcttaatctaggtgagctgatgatagcattcagaacggttccgggaaaagaaacaggattcgatacttgcggcttctggcaggagcaggctaaaaagctcagagaactcttcagaaaacttttgcaaacttaactacgcccgctgtggactttggacatgctaattcctatagggcggttagagaaggggaaaaaaaatccctgacagtttccctagttagtttcttttcactgacttgaaggcagaaaagtcttactattttatttcctgatcctttcatctgaggaagacaaaatggtttgggtgttaatccagcggtaggggcagcagtaagttagcagacgggctgtctctgccgggctgggttataacttttcctactttgtatcaaagctaaggcccctgccagggaggtcccgaccggctcccagtggatatctttggggacaccctgatgttttcagccctcctgggaggccgccccagaaagctgagacgagtgcctcccgagggtcgccacggcaacacagcatcccccacatcccaagctaggaagaccgacccggggctgcgggggcccctttccagaatccggccccgcccgcctggccgctgccctcgcggatctcccccggcctcgccggcctccgcctgtcctcccaccaccctctccgggccagtaccttgaaagcgatgggcagggtcttgttgcagcgccagtgcgtaggcagcacggagcagaggaagttggggctgtcggtgcgcaccagctcgcccgggtggtcggccagcacctccaccatgctgcggtcgccgctcctcagcttgccggccagggcagcgccggcgtccggggcgcccagcggcaacgcctcgctcatcttgcctgggctcagcgcggtggaaggcggcgtgaagcggcggctcgtgctggcatctacggggatacgcatcacaacaagccgattgagttaggaccctgcaaacagctcctaccagacggcgacaggggcgcggatcttcagcaagcagctcccgggagaccaacatacacgttcaggggcctttattactgcggggggtgggggggggcgggggtggttaggggaggagggagactaagttactaacagtccaggaggggaaaacgttctggttctgcggatcggcctctgacccaggatgggctcctagcaaccgattgcttagtgcattaaaaagtggagactatcttccacgaatcttgcttgcagaggttaagttctgtctttggctgttagaaaagttcctgaaggcaaaattctcatacacttcctaaaatatttatgcgaagagtaaaacgatcagcaaacacattatttggaagttccagtagttaatgcctgtcagttttttgcaggtgagttttgtctaaagtcccaacagaacacaattatctcccgtaacaaggccacttttatcatgcaaaactggcttcagtcccgaaaagcaagagctgagacttccaaaggtagtgctactaatgtatgtgcacgtatatataaatatatacatatgctctacttcataaaatatttacaatacaatctgtggagaatttaaacacaacagaaatccattaatgtacgctgcagatttttttaagtagccttgaaaatcagcttcagtagttggagcagtgctgagctagaagtacttgtcatgttctctgttctctcaatgaattctgtcaaaacgctcagtgcagaaaattcagcgtttcagagatcttcagctaatcttaaaacaacaatcataagaaggcccagtcgatgacactcagggttctacagctctcccacatctgtgaactcgggtttggggatgttggttaagtttgtggctggtcctctggtttgttgggagttgagcagccgcagagtcacacacatgcaaacacgcactcttcggaaggcagccactgtctacatcagctgggtgactcagccctgactcgggcagcagcgagacgatactcctccaccgtcgcccagcacccgccggttagctgctccgaggcacgaacacccacgagcgccgcgtaaccgcagcaggtggagcgggccttgagggagggctccgcggcgcagatcgaaacagatcgggcggctcgggttacacacgcacgcacatcctgccacgcacactgccacgcacacgcaacttcacggctcgcctcggaccacagagcactttctccccctgttgtaaaaggaaaacaattggggaaaagttcgcagccaggaaagaagttgaaaacatccagccaagaagccagttaattcaaaaggaagaaaggggaaaaacaaaaaaaaacaacaaaaaaaggaaggtccaacgcaggccaaggagaagcagcagaggttgacttccttctggcgtccctaggagccccggaaagaagtgcctggcggcgcagggccgggcagcgtggtgccctggctgggtccggccgcggggcgcccgtcccgcccgcgcccgctggctctatgaatgagagtgcctggaaatgaacgtgcttttactgtaagcccggccggaggaattccattccctcagctcgtttgcataggggcggccggcggccaatcacaggcctttccggtatcagccagggcgcggctcgccgccgccggctcctggaattggcccgcgcgcccccgccgccgcgccgcgcgctactgtacgcagcccgggcggggagtcggaggccacccccgcgccccgcatccaagcctgcatgctggcccggggccccgcccgcgtgcggacccctttccgcagccacacgcaggcttgtgcggctccgcgagtggccacggtccggagacctggaaaaagaaagcaggccccgccggcccgaggaggacccggccggcgcgccgcacccggagaggcccggccccgcgagccgctgcaggcaggcgcagtggccgccacgaggctcccgaaccgggctgcagcccgcggacggccccagatcctgcgcggccgcccagggccaggcctccgcttccagggcgggggtgcgatttggccgcggggcccgggggagccactccgcgctcctgcaccgtccggctggcagctgcggcgaagcggcgctgattccttgcatgaggccggacggcgtccgcgcgtgccgtttgctctcagcgtcttcccttgggtcggtttctgtaatgggtgttttttaccgctgcgcccgggccgcggctcgatccctccgcgcgtctcacttgctgcgtgcgtcagcggccagcgaagagtttcctagtcaggaaagaccccaagaacgcgcggctggaaggaaagttgaaagcagccacgcggcttgctcccgggccttgtagcgccggcacccgcagcagccggacagcctgcccgggccccgcgtctcccctccggctccccggaagcggcccccgctcctctccccgcccccgtgcgctcgagcggccccaggtgcggaacccaccccggcttcgcgtgcgggcggccgcttccccctgcgccggtccccgcggtgctgcgggcattttcgcggagctcggagggccccgcccccggtccggcgtgcgctgccaactccgaccccgcccggcggggctccctcccagcggaggctgctcccgtcaccatgagtccctccacgccctccctgccgggccctgcacctcccggggcctctcatccaccccggggctgcaacccagtccccggatcccggccccgttccaccgcgggctgctttgtggtccccgcggagcccctcaattaagctccccggcgcgggggtccctcgccgacctcacggggcccctgacgcccgctcctccctcccccagggctagggtgctgtggccgctgccgcgcagggactgtccccgggcgttgccgcgggcccggacgcaggagggggccggggttgactggcgtggaggcctttcccgggcgggcccggactgcgcggagctgtcgggacgcgccgcgggctctggcggacgccagggggcagcagccgccctccctggacgccgcgcgcagtccccggagctcccggaacgcccccgacggcgcggggctgtgcggcccgcctcgtggccttcgggtcgcccgggaagaactagcgttcgaggataaaagacaggaagccgccccagagcccacttgagctggaacggccaaggcgcgtttccgaggttccaatatagagtcgcagccggccaggtggggactctcggaccaggcctccccgctgtgcggcccggtcggggtctcttcccgaagcccctgttcctggggcttgactcgggccgctcttggctatctgtgcttcaggagcccgggcttccggggggctaaggcgggcggcccgcggcctcaaccctctccgcctccgctccccctgggcactgccagcacccgagttcagttttgttttaatggacctggggtctcggaaagaaaacttactacatttttcttttaaaatgatttttttaagcctaattccagttgtaaatccccccctccccccgcccaaacgtccactttctaactctgtccctgagaagagtgcatcgcgcgcgcccgcccgcccgcaggggccgcagcgcctttgcctgcgggttcggacgcggcccgctctagaggcaagttctgggcaagggaaaccttttcgcctggtctccaatgcatttccccgagatcccacccagggctcctggggccacccccacgtgcatcccccggaacccccgagatgcgggagggagcacgagggtgtggcggctccaaaagtaggcttttgactccaggggaaatagcagactcgggtgatttgcccctcggaaaggtccagggaggctcctctgggtctcgggccgcttgcctaaaaccctaaaccccgcgacgggggctgcgagtcggactcgggctgcggtctcccaggagggagtcaagttcctttatcgagtaaggaaagttggtcccagccttgcatgcaccgagtttagccgtcagaggcagcgtcgtgggagctgctcagctaggagtttcaaccgataaaccccgagtttgaagcccgacaaaaagctgatagcaatcacagcttttgctccttgactcgatgggatcgcgggacatttgggtttccccggagcggcgcaggctgttaactgcgcagcgcggtgccctcttgaaaagaagaaacagaccaacctctgcccttccttactgaggatctaaaatgaatggaaagaggcaggggctccggggaaagggaaccccttagtcggccgggcattttacggagcctgcactttcaaggacagccacagcgtgtacgaagtgaggaattcctttccaccaagagcgctcattttagcgacaatacagaattccccttcctttgcctaagggagaaaggaaaggaaacattaccaggttcattcccagtgtttccctggagtaatgctagaatttacttttgtcataatgcaaaattaaaaaaaaaaaaaatacaacgaagcgatacgttgggcggatgctacgtgacagatttttccaaattttgttgcggggagagggagggaggagaattgaaaacggctcacaacaggaatgaaatgtacatttctgcagtggatttaaaaagtactgcttggttagttggaagaaaaataatttcattggaaaacagtaacagtgcattgacgtttttcttctacaactttaggtaaagaactataggtggtctcagaagataactaaatcttttacctttttgctctttcaaaagcctccccaaaatatgcataaagatgggattagaatctcaacaattctcttaaaattaccctttgcgagcaatatatttccaaaatcacatttgtaaaaatgcagtacgtctaaaagaattatttctattttaaatgaccatttacattttaaaaaatagaatgtatcttgctatggtttggaaccaaatagctgcagtttgtattgatgtcacagggatggaaaacaattttgatgaagagtaacatgtatgtacaaatcacctgccatacacactatccagttttgaacattggaatttaattaaacatttttttcttctgaagtggctttgagattacttcacttttcaaatctaattactatgagaggggggaggagagcccttagttcttccattacatccttcctccatctgaatgtttctgtgggatgctatggttaatgtgtgatgatttcactttcacttcataaacccattgtgtacctcacaagtagcaagctgaggacattttaaaattaatctttttaaaatttaggaatgcttagtaaacattttactctcataaaaatcttgcattaccactgctataacacaggtaataagctgggctgtgagggaagccaagctctgttttgtttttagagagttgtatagaggcatttaatagcatcagaatgcacctatggtaaacgctgtagaactgagggtatcatttaagctttcattgaaatattttatatggtataacatttacaatatggagaactgcttttaagtatattggaatcagcagaaacagccttaattatttggttaaattatatcacaagttatacatagagatacatagatataaaatcatatacacatctatgaaggtgtgtactttatttaaaaatataacttggaatttaacataccgtggacgtctctagaaggattcattccaagtatgcattctgaaataacagaaagtaggaaaataaaagtaatgcaagtttaaaaattaactttcccccgacttttttttttttgctagctcatttcttcttacactttttagcactggagatttttatagctttgacacaaaaatgacttgaaatagtaaatcaccaaataagaaataaactgttccttatgcacgtggttttaggtaccttcaaccaatgttctccttcactagctaatactgaatatctgtcatagaatcacctcttttaagctccgtgtgtgattaaaatgtgatttatttaatgaagatttaaaatatatttggaaggtgtaggaacattagaattcaagggaaaattaaaaccaaaccctaacttaacgcaaaaacatttatgatcatttacttccaatgataggacattttagaaacattttcccctgcttactctccttcccttctctctgctaggcaggtaaattatttacatcgaaacctctcacaagttctaatagattatatcaattattattagaaataattgttacatgataattcccaaatatggatcacttactgtatacatttacaactataggtaaacccattaagcaaagtcacatgaagctctttttctttcctttgaatatctacatataatgttgtgaatttgaaattactctatcagccttgtatattgataacagcactgagtcacaaagaggaaatactgttctttaaagacaggatttgagcatttcaaatgctgcagacctaaagctttcaactccatgccacaatatttagtatgctgtttttttttttttaaaaaaaaacctttaaaataagaggagacaattacttcagatttctagatgctgtttaaataggcaggaaaacaagatttgcagcttctttagtcttatatttttgccaaagtaaaaggaacaactaaaataagaggttctgaaggactgctctatgatgaaatattaaaggaattaaatatgtatagtctcaaaggagcatccaaaaaaaaacgagattgtggttcacaagtagataaaatgactccatgaagacttttctttttaaagagcaaggcagagaactaatcatttgcactaattgtgaatgataaggtaagaaataataaatgtatcctgaagttacgtcagctcagctttaataggtgttggggcagtggggtgggggtgtggaatccacaacggtaagactgaccagacagcacacccagcggaaccacgcaccctggaaattatgtcttgagacccagagaagcttttccatgtctgagtctaagaaattggagtaggagagcaagaaaacacaagttcatctacacacctaatagttcagcaattctgaggaaaatgccaggattttttaaacccaaaaacaagggcaaaaatgagtggattttgaaaactgtgattggtaactattaaaaactttcttagtttgttgtgtatcagcagccttgagaacacagcaagtgtggttaaattggggagggggaaggggtagggggtgagcaactgctgcccaggtgaagtagcacctgtggaggtttgaagtgatttgcccatgaaactgttaaagatgccagaacccaaactgcaagagaggggaggttgcgtgtgtttaagacagtgaacaatgaatctggtagcccatcctccagtgtgctagcttgcatgctctctctctgtctctctcttccctacatcccccattgaatgtaattatatgccaggcaatgggtgaagtgcttttatatactttgcctgatttaatcctcacaagaacatcattgctacccccattttacagataaggaacctcacccttggagagttcaggtaacttgcccaaattcacatcactcttgacctacatagaaacacacacacacacacacacacacacacacacacacacacacacacacatattcatatctacatataggtccacatgcatggtaagctatgttccttttggatcatgattatttttgtggctatccttggtagagttctaaaaaattaactctgatctcatctttcacttttatcccccccgtctcagggtctagatcagaaaatatcttggaaattcttcaccatgcaaacctcatatcattaggagtcagattttaatgtcatttctgtcatccacagagtttgaggagaaagccaaggtccatttggctgagaagcttttatattgataataatataaaatggcgttttagtcttttcccacctccactagtttaaaagggcatctttaggactttcctagatacaaggtatttgattcacctgccttcagcattccttgaatgcttcctctgtcccaggcaaggtgctaggctcactgatgacaaacaccaaacagatgagagtaaagaagtgtcatggctgttggtggacacatgtccagggtcccaggaactggtgggagggaatataagaggaagaggggccaacagcccctggtgggctcaggaaagacttccttcctagcagaggtgatttttgacttgacttttggaggttgggtagatttttaggtggttcaaagagctagaggaggggtttagggaggtgacggtggggtggggaaatggtgctctgggctgaataagcatcatgaataagggcgtgagtttatgaaacacatcagtgtgtcagttccagtacagttggggcataggtttgagaccaggttggggagtgggggagggagtgcagcagttcaaaaatacatagacgtagataggtcattggaagcacaagcaacctgaggaaatgtgaacttcaacatgcgggaaaattgatctgtcaaagccaaacagggaaataacaaaattaatatatatattagaaaaataagtctgtcaacaacagctcggtgagttggagggagtagagatgaggagtggggagctatagcagttgtcagacaaggggtcatgaggatctggattaagcaatggagatggaagaggggattgaggtgagggagggggaggagtctccccagcatctgtcctttaatagtagtagagaagaccagaaacagcgggtttacagagagacatcgtgatgtctctctgagctttggatgcccagaacagaataggaggtgctggtggggaaaacaggaattctggggagaggtttcatgtagaaataatgagctgaacatccttagaatatctattgtagtttcagattgtatctagggtacaatcaaactctatgctagtttcagagactgtttccagtgagaagagaccattctcaggttctgggattatcaacattccagggtgagcagaagagggagcaaccaaggagatggagctaggaaaagaaagaggagagaataagtaataagagtaaaggaaaatgcagccgggcatggtggctaacgcctgtaatcccagcactttgggaggccaaggcaggtggatcacctaaggtcaggagttcgagaccagcctgaccaacatggtaaaaccctgtctctactaaaaatacaaaaattagccagacatggtggtgggcacctgtaatcccagctattcaggaggctgaggcaggagaatcactagaacccaggaggcggaggttgcagtgagccaagattgtgccattgcactccagcctaggagacaggatgagactctgtctcataaaaagaaaagaaaagaataaaggaaaatgccagctttggaggaaaaccatggcccaaaggccacaaaggggccatgaaaacaaggactgaaaatatgaaaatattccactggatttgtctacagagagtgccatgtaacctttgccaaaggagcttcagttgagtggcagcagcagaaatggagcagagagtagaaagcgaatgggatgtagggaaggagagaatgaaatttgttggaggagggagggaaactggtgaggtagcaggaggagagaaagaccagtgttgagaggtgtttgtgtatatatatgtgtgcatgtgtgtaagatggaagcaacctgagaaaattagtgtttgccatgtgtattttactgaaaataaaattcatcagtttccacttcaacccaggtcttcctcttgttttccccactgcaccatcattctcccagtttccagacttggatccatggattgatctttgccctcatccagtctgttgccaagatctctttttgatttctttggttgataacaattcggcccccacctttcaattcctattgacatcattctggttcaagttctcattacctctctgaagatttcttacaaagatctctgaaaaagggggttcctgctaattgtatacagtacttccagattagtctcctgcaccatagttctgctgtgttctcctgggcatctggaattcaatgcaaggtctttagcacagttctgcaggattaagagctacccttcctgtcctcatcttggaggggggcagatccttctgcctcaggtgaaattgcctcttaaagaccaatcacatgctttatcatcatttccacatctcctatgtgacttgaattataatatattttgggttatagctatttaaatatattgggtggtggggcgggtgagaggaagtggtggaaccaccccttccctggcttcaggtttccatgtggaacaacattccttagtgtaaaactcttgacctctttttacaccctcattcctcctccaccataaaagattgaattacctagttagtagcgttggaagcagaaactggttgtagaaggcagaagcataaaatgaacccctcaaactttccaccctaatccctggggctgggaatatgatgagttgtcatgctctggttatgttacatggaaaaaaagagatttttttttgcatatgtaattaaggttactaatcagttggctttgactcatgcaacagagagattttcctggtagccctaatctaatcacaggagaccattacaaacacagtgttttctcaggctggggcagaagtgaagtcagcattgtagctagaagacagagcaggcacttgcaagaactagagagcagtctctagatgccgagggtgacccctgattgacagccagcaaggaaacgagggccactatgctacagccccatggaattgcattctgccaactacctgcatgagcttggaggtgaatttctccctaaagccttcaagtaagggctcaggttatccaacccctggatttttggccttatgaagctgtgagcagagaatctagtacagcaccaccagatttccgacctgcagaactgtgggctaaatttgtttaaggtgctaagcttggcaatttgctcgttttacagcaataagaaaacaagtaccctgggcatgctctttccctctccttattcttttggggagacactgcttgggtattggtgagtgagtctccctatttctggagctcagtagcaggaagccacatacctaagccatgctctccaaaagttctatcagtgaccaagctggtatttttatctccatctgcttgactcctttgtcatctcactgttgattgtggatcaccggagagcaggggtgttttttattgagcctcctaacagcccaccagataattgtcttcatctctctagattcactctcattcccacacaaacgcaccagtggattgtgaacaccttgccagcgaggctgtgttttactcacctttaaattccctaggcagcactgcagaaagtgaatgcgtacctgagcccctgtgagtctggttaactacagattctgcctcagcaggtctcggaagaagcctgagattcttggtttcccataagctcccagtgttgccactgccgctggttcaaggtctgcactcagagttggaggatccagtatctcagatagaactttttatttttattttttagacagagtctcactctgtcacccaggctggagtgcagtggcatgatctccactcactgcaacctccacctcctgggttcaagtgattctcctgcctcagcctcctgagaagttgggattactggcacgtgccaccatgcccaggtactttttgtattttttgtaaagatggggtttcatcatgttgtccacgctggtctcgaacttctgacctcaagtgatctgcccacctcggcctcataaagtgttgagattacaggtgtgagctaccacgcctggtgcgattggactttttaagctgttgttatggcctgaatgtttgtatccctccaaaattcacattgaagccctaatcctctatgtgctgctatgagtaggatatgtgggaggtgattagattaagatgaggttgtgaggctggggtcctcatgatgggattaatgctcttataagaaaagaccagattgatctctctctctctctttctctctctctccctccctccctccaccgaacccaatcgtgctggtaccctgatctcagacttcccaacctccagagctgtgaggaaatacatgtctgctgtttaagccacccagtctgtggtattttgttatagcagcctgagctgaccaagacaagtatggtaatagaagtcaccagtacatcttctatcaggcctcacaaggagctgctttacatacattatcccatttaattcttgagcagtgagtggtccatcattactcccttcactttacaaatgaggacacttaagatttagtaatcagctcacccattctcagcccatgcagtttgcctgcagagtgcccggttgcagccagcagcttgcaagatggtcaaaacattgtattaccagtcaaatttccttattagatcctgacaagttgcctttaaaccattaggacaggctgaattcagaggctcaagcttctaactccagtgctttggaaggccaaggctggatgattgcttgagcacaggagtttgagaccagcctgggcaacatagcaagaccccatctctacaaaaaacaaacaaaagctatgtggacattctttcttattctagagcagcacatccaatagaaatataatgagagtcatatacataatttaagattttctagtagccacattaaaaaagtaatgggcaaaataaattttaatatgttttatttaacccaatctattgaaaacattgtcatttgaacatgtaatcaatatgaaaattattaatgagctattttacatttttcttttgtttctgtactatgtcttcaaaagtctgtgtgtattttacatttatagcgcatctcaatttggtttagccacattgcaagtggtcaatactcatttgtggctagtggctaccatattggacagtacagttctacaggaaccactcaaaacacaattcaccctggatagcaattttgctactagtctgctagtgcttgagtgagctgtttttaaactgctgttagtgaggaccactaaatagtgcatcttacttgactcgtgttttccctctgagctgtcctgaagcaaagttcagaatttttattacagcatgacttgattgactcaaaggtggaagaacacacatactcagcagcaataactgagttgcaaaggcctactaaccactgacaacaccactaatgcatttttacagccatggatagccacaagttaatctcacacattgttcatttccacttaacattcaccagtcatgcatgcctcagcctataaaacagtgctttggtttccttgagctcggaaacaatattacaaaagcatctcctgtccctttcttttccagcaaaaccagttccctatgaaacacacctgacgtatttttaaatataagcattatggatcagaaattggaggttctatttttaataggccatgattttaaaatagaatttccaattggttaaacgatactcactctcaaataggaattcctataaacaggtttattttgaaatatagcatataaatttttcaaaaagccatcaatgtttcagtttgctggcaatctaccagttaaaacacagtaatagatcaattcagtgagggagctactggtctaatggtctaagctatggaatccatcctcatcagaagaaataaccaaggagcgggaatgtggggagaggttcacaacagaaaccactgcccctacttgcctgtgttggttcttaaggggctgctgggaacccctgaaggtccaagtgtctcttttgtgcaaagataacagtttctggctggtcacggtgggtcacgcctgtaatcccagcactttgggaggcagaggcgggtggatcatgaggtcaagagtttgagaccagcccggccaacatggtgaaaccccgtctctactgaaaataaaaaaagtagctgggcgtggtggcggcgcgtgcctgtagtcccagctactcgagaggctaaggcgggagaatcgcttgaactcggaaggcggaggttgcagtgagctgagatggcaccactgcactccaacctgggggacagagccagatccgtctcaaaaataaataataataataataataacaataccagtttctatctgttagtcttacgggttgaagacagaggttaaggggccaacgtgtggaccctggaaagggtgtgagcccttctccacattctctttggtgtgggcccttctccacatgctctttggttccgtcagctacagacagaggttatgttttaagagatagactgagaagtcactctccacatgaaaccagtcttctcttcgagtgatatccttcagctaagcattgtgagaaagtatccaagtggagcatctgaaaattgcgctccagggaggggagtttagggacttgtccatggctttcagttccctaattggcgaatgtcacactagtaagattttctggtggatgatagatgcagagtctataaagttgctaatacttctggagtctgctttcttttgtaatctgctttatttgaggcattttagttaatatatttaaagctatttccaccacaatgaataggaaatgtgacatgatttttctaagttgagtaaaaaagaaatgaatgaatgtatgaattgaaagcaggggtcctgttcctcatgtcccacatgctatcccacagcaaatgctccttcccaaacagaatcatttatttggattctttgtgtttataatttactctttcactaggagaattatgagatagaaagtattttttccttaagcaacttttgtgttcaaaaataacagagtgattttaattggttcttgaagggaggagggtaggggattaactgcagaccagcttgataagacgacccttggtgagctggtagagcagtaggtaggtctatgttagaccttaaatgtggacaatggtgggtacaggacaggcaaaggaaataccccaaagctggctgaaacagcaaatttctacatggacaactaattcttggatacttggagtaaagacatcaatatatattataaagacataaatacatatatattctatataaaggtatacatgagattcacacacacaaatatattatcttcaaatgatagctaggtaatcattcactcagattccaaattcaaaatttaagatttagagttattgatgactggattaattcatgcaattaacatgaaccccaatatatttgagtgcaggagtactcactatctcataaggtagaggaacctgtaggaagtttgttactagccatgtgagcaagttagttacttaccttgccccagcctcagcctcctcatccacaaaacaagaggcttggacaaggtgggttttccagctccaggaacatttatgcaaatgccacttggaattgtgggaaatcggcccgggtctggtgcttacccatgtcagcatatggctagagtgaacttgggtttcgagtgggaaggggccaggaaggaaaaagaggacccagaatcaactagagataggacattttaaggactttcccatttcacataggttttctctaatttcacataagtattgcctgttttaaaaagcagattcaagaagatatgatttaaaacaagtatacacataaaaataactctgagattctgcatcttctagaaaatcacagacatgttgctatcgtattctataatttacatggtgattgagaatagacccacagttactcagtgttatccaaaataatttattattataatcactaaaaatattacaattcagctctttgattaattctgtttactccatgcccaccaaattagtgaagtttcactatgtatattacaaaataatagtttaaaaataatatggatgtacaatatagtttaattcctattcaataaacagataagcttcattattattattacaactgttactacctcaaatttgtgacttttttactaaaataaaatttttcctatttatgatcccatatagactatagagaaatttcccacaaacatagcagaattccttagaaagggaatatagaagctttagctaaattttgggtgccgaatcacctatttgttttgggacatagaaagtctactcaagaatccagagtaagaccttgatctcagtcttgcttacaaggtcttgatctgtgaaggaagtgctgagatatctacatttgtcaattaaataataaattgccaaatatcagccttagagtattctataggcactcggataagatggcaaatactttcatattaatcctgttatcttcaaatttggaaaacagactgttataagaaacagttggctaagactatcaatatcctgctttcttgtggggtcatgaaattgccatagtttacaaaaactttaaaatttcatgttgtagtctgaaataaaaaatagctggaaaaagcaacaatagaagtaataatcctattctctaattacgtaattatattttctaaatttcatgaaactgctaagatctgtattgtaatggttacatattttcaggttacattattactattatacaattgatattcaataaatgatacctttttatgggtaatacattgaaatggaatagtaaacattttttgcggagacttctcataaaacatcattgtctacctctcaaacaatagttaagtgagatttaaacttttttatatgattgttttggacttgcttagaaaaatactaccatttaaaactatattctaaaaggtaaggcaaattttgctagaatttttgaattaaaaaatggtgatatttctgtagagttatctttttgaaaggtagagagaaagagtggaaagatttttttaataaaattaaactaaaacatctgaaaatagatatgacttgatagctaatttttaatttatatttatacgtgcaatgaaatctatattcagagatcatccaaaaattattagaaacatacaaacaacacttgaaaaatgttatcacatatttttgcagagtaggttgttttgaaaacagccagagcaaagaaacagatgatcaccaaaatattaccacaaatgagcccaaaaataaattataggtcatttctagttgaaccactgaccaattagtgcactaatcttaagtaactacatagcacactcccatttttttctttcctagttatcttaacaattcaaatgcatgtgaagatacccattttgaggagaatttaaaatgtattattggttgatacagcacttctaggtaagttctcaaggggggcctgcagcaaatatttacataaatgtggactttaagattgtttcagaagtattctgttttaggaggttctgtaattgtcaacttctcggtttaggaagaacctcacgttttagagaagaatattctagatcaagtctttttccttaatgcagaaatagtaaagtttctaaaatagaaatcattttgtttagccttctctttaaccaaaaacaccaaataatgaagtagacttctaaggaggaaagaagaaaactttaccaaatatgccagtgggggctccacttttagtctgcaaacctctacacctgggagctgcgctgtcaaattgagtcaggtcctgattgagctgaatgatagacacatagtgcccagacaccgtgcacagtgaactcactctaggagacccgcacgcccccttctcccaattcacccactgctctggaggtcattatttaacaccggcaaattgaacgacaacatgaaatgaagtgcaagatgtagatatttcttccccctcactaatctcgctcacaagagaattcattcttttctttttgcctcaggcatatccaggctagcaattttcattttgctacctaaatgatttccccatcccccacctttcccaattagagtggaaatggattaagacttcaggttaacccctccgttactgggaatgagaaggaaataacgttattatgtgtaagctttattttcaccgttgtgtatgatgctcttttctgatcatggtaaacacagatttaattaatcccactctccccaaaagacattcctttagtgaagatatgacactgccttaaggtaaagagcaagagaaaaacttctttagccagaatgttattctgttaacttgtcatctttaaagtgttctagaatgcttatgagtaaaattaggaaatttggatacaaagtaggaagttatatggaagcataaaagcacattggttcttcagttacagagaatggatacaacaaaagttaatacttccttggtttttactaagcttgaaatatctggatctaaaaaaattaagtgtgggataaatatctagaaaatgctggatcatctgaaacttatcacgtagcttttccccctacagaacctaaaaataaaaacttctctagaaaaaaagcatcctctctttactgatctttaaaaattttaaatgttgaagccctgagtatgtatacctcacataactcctctatagcaacctataaaacaagaatcctctctcctggtggtctgtttattttgctatgaacaaaagggaaggagcttcagtatttctgaaaataacctgaattcccctttgagacaaagttttggattttcgaaagtaaatgtggtacttttctattttttaaactaatatataagtgtacatactattggctttgttggtcaagaaaacagtttatcataccaggaagagactgggtagcagaacagcagcctacgaatgcattagatttgggttatgctgggttttgacaggtttgggggtttaagaaactgggttggttcgtcactaggaatccattaagtgttgctagtccgtgaggacagagaaagctgtggaattcattcctcaaaagcaaaagccttatttgtgctaatagggttataacaactgagcaaattttagtggacaaatagtagaggtccttaacatttactgagctattctgagcttcagacattgtggcaagggctttctgtgcattatgtcatttaatccttttggtaatactattaatttaggaacaattatcccctaaggcttaaagaagttagacaacttgcccaaggccacatagagatggagcagtgaaagtaagaatttgacccagtcagtgcacagagtagacaatctttgaattacatgcatttaaataaaaaaaggctgttcttcatagttctcattgaataagtttcatagacaatgactttcccaaaggactccttttgcttctgaagggcagccactctccagttaaaggggatttgcaaacaggcccactctggattgcagtacaaggaaaggaactgctttagaaacacagaacccagatagatggataaatatttcaatgcctttccagaatagtacttaagaagcagagcccatctcagtttgggtttgagcccatggccttatggtttaaatataaaatgcattaaagctctttatttagagagtcacgtgcccttttgtgggagcagccccaattctccctctgactttagtgagtgtacaatgcaaataggtgttttgatattgtcattagtattcattattcatgaggacttgatcgtgtattcaaagtcagccaggagggtcatgtgcccccttcagtgaaaaccttgactctaaggacagcactttcctggtgtacagtctttgggggctcttgacagcaagaaaacctaaacaggagaatcccacttagcatctgcccacaggtaaggggcacagagaaggagatatagacttctaatttagcaaaaagaagtatgctgccatgtgaaaagtttctaaacagtgacttctaaacaataggttgtgacccatagattggttgttaataataataataacaaaagcaaggtaagaagaagaaatagaacagaataactggaaaatagagtgcttcatcagtagtaagggtgaatactgcttcctgaagctctttttttgattgatgtatctcccctgagccctggcatactatttacttcttactgtttcttgctattcaaaaagtttgcaagcctctagcctaaaatgtcttattttcttagtactcaatttgttacttgacttggtgtttggctccctgtgactctctgaagttctcctttctgtgcctccgcttccacctttgccaagtctaaaatcatgccatgtaaaagttatcaagaaaaccaattaaatcataactgccgaagtgccttgtcaagctaaacagtcatgagaggtgaaggattattatgaaataaaacagagtgaagctgttttgaaggccatccttctgtggaatagcattgggtcatttcgttcagaggcgaaaagattcttagcaaacattgggtcattttgtttagaggtgaaaagattcttagcaaacattttgtccaatccatttagtttatagagggaaaaggaggctctgaaaagtgagtggctcttctaagctcccgaaacagtggctgatctgggaccccctgacctgtgaatttgtggtccacccccatgctctgccactcctccaagagccgttttgctacttctttaaaaaagggagggtcttatgaaattgtatttacagaaaatttacaactcatgcaaagctaaatggatttcttccctttcaaagtggtttcctgattgcaatcacataaattaaactccagccccaaaaaagtcattcgaacagagtaatgatacatctccaagaagagatacagagaattctttgaaattctcaagaaataatgcaatgagatgcaaaagggtaactattattaatcttcttcctgaagtgtcaatcaggaaggtatttttaaattgtattggaaaggaagaagagacaatgtttcttcccattaatgatctgaactgaaagtaagggaggaactaaaaaatgtgcaaaatgtcctcggggaaaaaaagtagtataaaacatagtcttggatgatacagcaaggtcgttgctcaattttatgttgtaacactattttaactgtcaccaagggctgggatagcaaatattgcatcaactctgcaaggtgtttcctgggttttgtggacaggggggtcgggggaggtgcaatctccattcttgtgaaggccagataaagacttctgctgcaagccactatctttttgtgctgaagctgtagataacacagtttcacaccctgctgcccaagtcctgctttcccaatttgtaggtctttattgcaaaagtcttttgtgtttgttttatcagacacattttatcatccttctccaaacaccctttgtcaaagtcagcctttgaacttcttttgcatatacatagaatgggaccaatgattcaggatatgtaacaggcttatcttataattctaaagaaagaggaacagagccattgacctttcttctatattttcttggggctggtgtgtctgtgtgtgtgtgtctgtgtgtgtgtatgtgtgtgctaggggtaagatgtacaatctcattacctttagaagataatgcaatagattatcctataccaataatttatgccttttagttttgcacaaattaaacctgaatcttaaagttcaacttgtctaggattgtactaaaggccgcattgcaggtagggctaatttcggggtctgatccgtgtggctccccatgctcctgacagtacaccaggaccactctgtgttcactcccgtgtgcagtccccatgctcctgacagtacacccgaccctaagattcttgcttcgcttgcctttgatatggtgatctctggaactgagtatcaaaccttgcttgaggaattaaaatgcttgctcatatcacttatatcttttaaatgtggaaaacagagagaatccacttggagcacatcagataggtttattactttgttcctcccttgtcattttttgcatgtctcacatcaaaccctcctctgcaacagtgaaaatataggatgggatagatgaagaaggtggtactccttccttctctgggcacagaggcaatttctcagtgcagctcacatgtggctacaaacacagagtatcactttcttatacagaccaggtcactgttcctcaaaaaaaaaaaaaaaaaaaagatggtgttctatttgataacctgcacttctccagagtgacctcttcagctgagtctggaagactgccttaggcaagtcccccgggtctctggctacagagggccatcctccatgagagatgagcttgtttcattgttgcaaagtatagccaagctgatacattttagcaagactaaaacttaatctttagggttctgggtcctttcatcaaatttcctctgctcacaccatgatctccattgtctcctcctcctcctcctgctcctccagttcctctttcctttcttcttctttacctcctccctccttgcttccttccgcctcttcctcctcctccttcttcttcaactattatctaccaagctgtgcctgggctgcccccagtgttttgcagtgtgaggaacttctacaggccagcttggccactgaaagaagccagtgattaatgtagttttaaacaaatcaagatttgcataaattggctctgaagtcagcttctacaaaccagctggaacactcgccatattcctagttcagtgctgtcttcccagtgggttctcagactttgcagctcacccttagccttctgttgcagggaaaccacatccatgtggctcccagtctctggcaagccagcaaagggctccaacttctcttgctttctccaccttctcctcactggctggagcactcaggactctcccaggtcctatttttctccttttggtaatttcctgatagaaactccagcaatgaagataattttcagaactgttttttttttttctggtacagaattcattttggcttctgggaactaagaaacaaatgaactgtctttctgaagtcaagaactgtataatgaaagctaaatgcagaggcaaaagccactgtcggttgccctttgtcctctctgtcaccagccctggacatgagggtgagacagaaagcctcgctcttccccagtgaaaccctgcaattgttctgtgccagatgaagccctcttcagatgctggacagggtccaggtgctgccctgtgagtggatgccagcctcagtcctcatccaggccaggaccatgtccagggcgggcttgctcctgaatcacatgcttccagtcaggactctgaatgcaaatgctggtgttttgtattttttgtcgttatgttattgttgttctttttttttttgaaacaaggtctcactctgttgcccaggctggagtgcagtggctcaccgcaggctccagctcctgggttcaagggctcctcccacctcaacctcccaagtagctaggactacagacacacgccaccacaccccactaatttttaaacatttttagacatgaggtctccttatttgccccagctggctgtgaacttctggcttcaaggtgatcctcctgcctcagccttccaattagctcatactgatgttttatttaaatatcgcataatatttcagtaaaaggcctgcaaagagggcacagaaagcattttttggagttcactgggggcaggacgagctatcccattaggtgggaaggggtctcttcctgatatgcatcatacagctgcttctagtggtggtacaggacccaggagaagaagagtaggtgcttaacaaatatttgctgaataaaggttgatgaaaatcaatgtcgacaatacatttattgggatcaggtaaggaacaaaggtgatattaacaacagctgccacctgcgtctattaccagacatctcatagatagcaaccctgggagggagatcttacatacatgaggacagaggaatgggagatccaccaaggtgcctgacagctgcatttgaacccatactcagatagaggaaccctctgcagtctgctcagggttggagtttgtggctgggagaaaagaggaacagcctctgcagccaaccctcctgggcagcgaatgtctcctccccacactgcagtgaacccctggccatccttccagctctgcccttgccccactccagtaaagcagccagagagtgatacacattagattgtgtctctcctccacccaaactccttgacggctttccagggcactcagaattccaggccctggaggaaaccagcccagcccatcacctagacctgggagcacctgtctccctcggcttgctctgccatagcctctgtctgtctcacagacgcgccaagctttttctgcctcaggaccttttcaggggctttccttctgcctggaccactttcctgtctctaaactcccccagttttccccatggctgctcaaccgtcatctactaaagtaatgggtaaagtaaccccgctccctacccctgaaccatcacaactatcatgtcacatgcacgggtttcttttcaccattgcatttgtcttatttgatttctgtgtttatgtatttgttgtccatcctccaagtgacagagggagtggatggagtgaaggataagttttgtcctgttcactgcccagcatcaagaaaagtgcttggaactgagtagatagtcaacagacacttcttaagaatgaatgaatcaatcgatgacaatgaactgtagctgccacctcctccagcctacgtaccctgaggcatcctagatctcagagcaaggagatgatgactgccaggcattgagtggtgaaaaaatattttcctttgctacttactcttctatcactgggtggcagtaaggctagaagcctgggaaatctccatcacccgtcctctctgttttgcgatactcttgggtgccctgagggctttagaggttgctgcggtcaacaacctaagcaaccacttctgagtttctggcatagtggcaaccacaactggccagtaggtcgaggaggcctctgcttaacatattgcaccgatgttttggttatgcaaatatatggtttttctcattccgatggaaaacatttctggccaagtcaaaactacagaaacacagcaaggaagactcatctatatagtcccctcagtcccattgccccagcctgggtccctctttttacaccctcagaagactgttcccattgccttcctagtctttgagatgcaggcatttggaaagcacacatctgatgcatacctgaaactccggatcagtcacgtaattgtttccagatatacaggacatgtgtgatgacagataggatatgaacagatgagtagtgattggatctgagctcaacattccaaaccgatgcaaactagggtgtggggagaagcccctggcctttcacttggggtggggctggggggccttcacctggtctagtttaatctagaagcaggcatagaaatggcaggagaggccaggcgtgatggctcacgcctgtaatcccagcactttgggaggctgaggcaggtggatcacttgaggtcaggagtttaaaaccagcctggtcaacatagtgaaaccctgactctactaaaaatacaaaaaattagctgggggtggtggtgggcacctgtaatcccagctacttgggagggtgaagcaggaagaattgcttgaacccgggagatggaggttgcagtaagccaagatcgtgctactccactttagcctgggcagcagagggatactccatctcaaaaagaagaagaaggagaaggagaaggagaagagaaataatggcaggagaaggagggagcagtggctttgcgtagacttttctctgggatgaactgggctcaggaaaggaagaaacctgttgggttctgatgcggggctgttcacccacaaaagaatggagaggtgcagatggaagtggatctcctgcagagatggtgtagagacagaatggaaaccccaggccaggagtgtcagctttgggaacagtggttggtggcatctgcagccttctgcgtcagctggacaccacacgtcttaagcctcgtcaccttctctttacttttttgccccttcaaactcacactaatttcagttgagacagggcagaatgcatactttgcaccaccctatgccacaaggtttcaatctggggtgggcatggggaccctttacattgtattctttaataattcacatggcagcatcgtagggctacttttaattgcttcttaaaagtaattaattgattttctgacgtatcagttaacaatgtattacactgacacgaagttgtgttttggctcttgattgaaccgagggctgtatggattaaattccacccagagtttagcttaggagactctaaaaatatgcctctataaaaggaaaggctttttacatggcgtgttgtctaaaaatctaaaccatatgtcctttccaggctgtcaatggggtaaaatatgggttccagtgtgtgtagctgctcagacttcgaacattcaggaggcataaaataacctactgttactcaatatggccaacactctggattaaagtcactcaggctatgccgagggaattctctctcagtcagtgtgaagcaggagccattccatcaaaacgtggtttgctaaggactcttggaaggaggcaaatatgagctttgttctgagagcggctgtctcctggcaggagctgagtttgtctgtagctgagtttgcaagatccattcattgacattccatgatagaagaattatacacagggaggattcccatcaacaatgcagacactattaatggggacgttaagaccaagattagttaagtggcttgccctgggtcatgcactgagtcagtggagcattaggaacaaggacctcctgacattttggcttctgtagggatttgtgtggcaattctgtgatgaggatgatattgtaactgccaggaagtcaccatgtatatttcaacacctactgtacccacaatatgaatctcttgacagggtcatttcacggggggcagcatttcttccccacttctgggagctatcactctggcctttctccccttcatatggtcagttgggcgtatgggagaaggaagtggcaactcagggaactcagttccctcctccctccctccacttggagctagtgcctgcaggaagcacacattctggtcagtgtcttcatgtggcatgttttacactggttcaactgcgcctgagacaggtgagagaattcagcattgggaagcctgtgtggctgcacttcacagccccattctgcaacttggccttgagctggcatttggatctgcatgtgtcccacttctttttgcctgtgtcctaattgatttggaactcaagagggctgccattcattgcatgtccttcaatctgagtgtaaagccaggacatgtgatgatggcagaacgagcccacttaaacctgatgcacagtgagctgaggccttgcttctcagctgtgttccttaccttggcctggtcattcgtgctcagtttcctgaattatagaatgaggataacgattcctcctttacagcaccgttatgaggactaaatgagatattcaacgagaccgcttttagactttgtttaccctagcagttgcccagttaataggacttgaactttttttttaattgcaaagtaccagaagaaagatgtagaaaaagtgtttaaaaaccttaacatattatgctatttgatttttcaatattttggaaacatcttaaattctgaccaaaacttacaggaggaaaattgaagggaagaattaatgactatgtggagacaagggagtgcaccctttatgaggaagaagaggtgtgtataggaagcacttcacaggtaaagtcaagctcatcactgatctggtcctgctgagctgaggacaatacttgacattcctctggtaactgtttacatgaccattcattcttccttgtccagcctaaacacaaataggcaaaaagactcatgttcatggaatctgctttaattgcagagaatggttgttttatgagcctcaaaggggaaaagcattttaaaagcatgtgaagaagcattctatgcaaatgtaaaatattattaacaatcacatgactactttgatcatgtattttaacatatttgttgtttcttggcaaagtggaaggtgttgtcagaccagaggaataagtgcaagagatcaatgatgtttgggtgactcattttataattatcttcaaactttaaggcttgcaaattccatttttcctaggtcagtgttattttgctgagatagagaacaaaagttaacattatacaaatatgaaaaaagtattctctggggtctgaagtgctgaatatcaacagcctcttcacattcctcgtttttggaagtgaaaagcttttacccagagatataggttgtcttcttaactctttgaaagtacagtaatgagatccaagcagattcagtaatccatattctgaaagttatttgggttaagaatagaagagttttttgtgtgtgtggggaaggggagagggggaagagtcatgaattatttaccatgattctagtgatggcagaaagcctcaagattttgctgaagtcactgattgattttctgacacaacaagtgaaaggcaacgccagtggctcattggtattgcatgtcagacacacgatcccctgttaaatgcagggctgcattacagctgctataagtttgtgtttcacgggtgggagaaagggataatttctgttacctgatcattaatatactctaaagagttctggaagaaagcaacaaacatgaaccccatgttcaacgaacataatatgggcccttcccgtgggcaaagtcctgtcctggagaatttgaggggtaacatttgatgaaggcatggtccctcactgttaataaatgcacagtctagtggaagtggcagtgtgattaccaaatactgagagttcgatgtagaatgcaatgaatgagatcacagaggtataaggcaagtgttatgggagcacaggaagggggagaaatgagttccatctgaaagggctgaggagggaggctcggaggaggagatgatgactagattgagtctggaaagagtgcagggtttagacaggcaaaaatgggaaaggaatttgagctagctcacatgacataagcaaagtcaaggaagagggaaagtacaggggatgtcacggaatggcacatgttggatgcagctgcgggacatatcagcatgggaagagagggcccaggcagaacagaaggccaggaagggaggccagccctgggtcgcggcggcattttctgagctgccaggtctttctatgtgttatctaacttaatgctcacaaaatccttttgggaaaggcatcatgattgctctaattttatacataaaatagcagatttatggagggtcagtaatacccaagaacacccagccagcaagtggcagagccaggacctagattcaggactgaaaatagcaaaggccatgctgtgaccccatgctgttccgacacagtagaagtcctataactaagtctatggctagggtttggagacttctttcccatgggcaggtgggcatcacagaaggactctgagcagcagagaaacctaagtgaccatgcttcaggtagagcctgaggaatcagtgaaaagaatgagtaggcagagattgaaagcccatcggccaactgggagatagggcacatgtctttgtgaaggggctgtggaagccaaggaaagagaaagcagatggagacagggtgaaagaggacactcagaactttggagcctagacattggggtgaggctagggcacagatgcagatgtccaggtgtttagcctgggtgactgggatgattgcaaatcatcaggcagttttcagttgaacaaaaagaattggaattctgcattagcattctacatcctacacctaaaggcgtgactggttattagacagtaagagaaatgctgaccagagttttaatactacatcaatcagaggcatttctgctgggtaacaaatttaataaaatgacaacatcccttgatatctctctcattcttggcagaaatatctcaaagaagatagacagatggaaaggtggtcagacacataaagaaagcaagcgagaaagcctggaacgttgagccctcatacaagcattgaaatgaatgtggggcttggtcagtatgaaaggcaagtcaatcatcatcactggaagtcagaatcaatttgtaagatggctcgtcaggaccctaaacgcataaacagaagaatgagaggttgttataaagtccttggcttggccgggcgtagtggctcatgcctataatcccagcactttgggaggtccaggtggatggatcatgaggtcaggagttcaataccagcctggccaacatggtgaaaccctgtctctactaaaaatacaaaaattaggtaggcttggtggtgggtgcctgtagtaccagctactcagggggctaaggcagataattgattgaatccgggaggcggagattgcagtgagctgagattgagccactgcactccagcctgggtgacagggtgagactctgtctcaaaaaaaaaaaaaaaaaaaaaagtccttggcttttacccaagtgatgatgctgtgtgttaaggtcaagttgatctgataaatcgctatgcaataatccaagcaccccaatcccttgggggtgctcatgagatgagagatgcaggggcatgacaatattctcaccttgaaaacctcttggggagacttctcaacataggtttgtgacaattgtcccctggtctgagttgaaaaaaatgtagctgatcattatcagcattgccagattaacactggtacccagtgaaatagtcatccccccttgcaagggttatgtggaaggaaggatctatgtttaacagattattttagttttaaaatttgcttatcttatatattgtgctgccatggatgcccttgattttattctttgttaggaaggaatatcatggctttgaaatcctgaggcctatactgtaaatctttcacaaatttaaaaaagtacatgaaataagatacatgaggccgggcgtggtggctcacgcctgtcatcctagcactttgggaggccaaggcaggtggatcacaaggtcaagagatcgagaccatcctggccaacatggggaaaccctgtctctattaaaaatacaaaaattagctgggcatagtggtgtgcctgtagtcccagctactggggaggctgaggcaggagaatcgcttgaacccagcagatggaggttgcagtgagctgagatcatgccactgcactctagcctggtgacagagtgagattctgtctcaaaaaaataaaatacaataaaaggatacatgaaatgtatgtgtgaaatgacagtagagtgtattttgagatatatcataatgtttagtatatgccagacactgttgtaatatatcaattcattataaatgaacacaaaaagggctttcactttcgcatcaatgctatgaggtaggtattgttcctattacactaattttacagatgaagaaactgaggcacacagttgttgattaacttgcctaagatcacacagctggaggagctgggattgaacctagacaatttggttcctgaggcatggtcttaactagtcgaagctgtttcccttggtactcaaacttaataaggtggatttgcaagtatagtctttgaaaagtgatgaccatggagagaagggacttttgtgagggatccctgatctggtgaccagtgagaaccaagacaactacactcattcaagaccacattttacgtttgagccctgttactggagaacagataagggacccatcccgtgtttttgacttcttgacctactgacttactacataactatatcgattttgcatggaagctcctgctctctgtgggtttgaccaggcaccattggcctgccttttgctgcaataagtctgggggcttcactcactccttagtggcttattctcaccacatatttggctcacaccagcagagcctgactcttccggggaaaaaatgatttaccaaattagcatggagataaaaatactttcttcttcgattgagtggtctccttatagaattgaaacaaaattagattcaggaagtggcatgcattttggtaactgatgcttgataattgagtattattagatttaggtttttgcccaaaataacgattgtaggacattagaacgaactatttcagatgaaacttttccaatgtgaatcaaattgtgaaaggaacaagcacatcctgaattagtgctgtatttttgaaacatactggagtaggtttaagcattccttccttcctcacggtaattgagcagatgttcttgccaggctctgcgttaggtacttggacttgggcagtgaatcagacagcaaaagcctcttcctttcaggagctgaccttccaggtgcagatagaaacactgaaatgaattctaattgcatgtgtggtgtgtggacatagcaaaataaccatcatcaaggaaaaaagtactcttcatatttagaaacttggctccatactattttaccaattttgggaatcccaattatttttttcccaaagatacattttagcacgtaggcacactttgaggctttactcccactctcttttgtttctttcactattttcttattccacaaccaaggtctttcccaaaaccccagccttttctcctcctgatggcaaattatggccattattagagacggtgattgtcccatttctgcacaatgaggtgaagcaagaatgaaaatgcttgtggattttggtactacctactgggggcagcttccaactggaaacacaccatgaaatttaccagtttcagaccaaattggatagtcacttaaaaaatcccatgtaagcatttgtacctttgtttcatatttaagctgtatattttacatacctgggaacacctggaaagatcttttggtatgactgtctggagaaggtcttaaacttttagattgttaaggaacttttcagttccttacataaaacctagagttaaaaacttgcgttctgaggccatccctatttctcttgtgatgtgatatgttgagaagttatatatacacatccacatgggcaagccacatactcactaagaaagtccttttgtgtaaataccaggagctaaataaacattttttcatgttttttctagttttattgtggtaacatatatatataacataaaatttaccattttaacaattgtatttttgttttttgatttgtttttgagactgagtctcactctatcacccaggctagagtgcagtggcgtgatcttggctcactgcaacttgtgccttccgggttcaagcgattgtcttgcctcagcctcctgagtagctgggattataggagcctgccaccatgcccagctaattttggtatttttagtagagtcggggtttcaccatgttggccaggctggtcttaaacaactgacctcaagtgatttgcctgcctgggcctctcaaagtgttgggattacaggcatgagccactgaacccaaccattttaaagtgcatagttatgtggcactaaatatattcacactgttgtgcagccatcaccaccttccatctccagaacatttttgtcttcccaaatgaaaactctttacacattgaaccagtcaacaccacctccctgtttccccctcccccacagcctctggtaatcatcattcttctttctgtctctatcatgtgactactctaggaaactcatctaagtgaaattgtacagtattttttgtgtctgacttatttcactcattataatgtcctcaagcttcatccatattgtagcataagtccctcctttctaaggctaaacaatattccactgtatgtacaaaccacattttgtttgtccatttgtgtgtcaatgggcttgggttgcttccaccttttggctattgcgacccatgctgctatgaacaagagtgcacaaatataaacattcttattcactctattgacataatcattttttttttcttttgagacagtgtctctctctgttgctcaggctggagggcagtggcaccatctgggctcactgcaccctctgcctccgggttcaagccattctcctacctcagcctccctagtggctggaattacaggtgtgcaccaccatacctggcgaatttttttgtatttttagtggagatggagtttcactatattggccaggctggtctcgaactcctaaccccaagtgatccacctgcctcggcctcctgaagtgctgggattacaggcgtgagccaccataccaggcctacataattgatttttaaaaattgtgacagactcaactatgatcaatcccttttgaaaatctgtggcaggataggataatattaattaattgatcttgaatacttccaaccctcctgatagattcatctatgtctttaatagacacttgatggccgcccagcatgtactgagcagcctgctggatctggaggattctgcttcaagtgtctctaacagaggagacaggactgtaagtggggggctcgaggctggtgctctgtgtgccacaagcaaggtgtgtgccggttctagaggagaagacagcagttgtgctttgcccttccaggattgtcaggaggggtttggtagcggtggagagaccagaactgaagagaaatgcatgcaatgtaccatccctgggctaggaacttgatctctcttattttatgtaattcttttaatagttttatgaggtaggtactttactgtctttatatcaaagacaaggaattaaggtttggtgagattagtttggccaaggtcacatacctagtaagaagcacatcactttatagctcttaactactctgttacattgatgttccaagcaggtattaacagggtaagggagagaaggggtgaagagtcttccagaaagagagaaacagtgatctacatcacatgggctgatgaaggagcatgggggaatttggagaactgcaagatgtccttacaagtagggtcaccacaattgcctgctggagtcccccctggtggtgaggcctggggaagccccctgttccctcatctcttcctcattgtccttctggtaggatagcaccagtgacacctggagaggctggatattttctgctcaatttgggtttctgctgcttgggaatttctgacataaacagatggaaaacatcagaatcatttttactgaataagtatctaccattgattgagcgcttatactaagccagacactattctaagtacttcaccttcattatcattctaaatcttcacaacaatccttagaggtaggttctatgattaccctattttatagagggagaaaatagatagcaattggcatggccttgattagaataatatgtaagcccaaaaaactacagatggtcattaccaatgtcctatttatgtattagaccctaacagccaactttctcaccttagcatgatacagttatgtcttgattacctctgttatggtatggcttatccttggccgttaggacgggtggctgtatagctcagtgtgccccaaaagaaaaataatgactatcaagcacccaggggctgctgattccctttcatcttgtgcaacagtaaagatgaaatatctatatttaaattgggctccttaagaggtgggctgtcactgtcagttagctttgtggttttcatttctttccagttcagaattggatttgtgaagaaactgaatagtgatgagaccggccctgttcaccctgatgacagttatgcacgtttttaagttgtgacgtcatgaaaacttgtggcacctttctgaacagccagaacttcatttcaaacaaaactctaattatagttgttacttaaaaaaagtccaaactctaaaaaccataacctagttgttgacctagtttataaagtctaggcattccacgggaattcaaggtgcacaaaggccaacctgaacttgtggctgaccccataccttctgctcttcttatatttcccatttcagtgaacagcaattctgtcaaccatcattcaaatgcaaaagctcaagtctttctttcccaacactgcaactctgttgattttaccacctccccatcctctggttatgtccctcacctcctccccactgctggtctctggagtttacttagtagatctcttcgatttggccttgactcccaccttgccatcttccacgctgctgctgagccatgtctctcgcgttaaaatctgaacacatttccctgcttgaaagccttctatagtccccagtgccaggaggtcctggccactgggcccactgtccacatctcctgtcttccccctcttgaatctaatgctgttgttgtattgacatttttgtgttttcatacgtgacagggcagttcacaagttggggcctttactcactcagtgacccaccccccgccatggtggttttgcctcttcccctatgatggctaacttctcttcacaacagcttacccatcaatccaacttgggatcctgtccctttgctaggcccaacttagctcctctcctcatttccttcaattcatttcaactaaatttcagttcatctttgatgaccacttgctaagtgctaggctctgtgctctgtgttgggaatatggagatgaatggaacacagtctctttccttaaggtacaacaggttaatactcaatagctacaaggtgtagaggtggcacagggtggctggtgactaattgtcttggaaggcacacaattcctggagctagtgatatcagggtagagtttgttaaaggacagtaggaaattgacctgtggctgtggtgtgttggtgatgagaagaggagagacattcgagttggaataagcaacatgtgcacagtcatggtggtacaaacgaagaaggtgtttgggagactcctatgcggtttagtatcactgaaaaagtctccttgggcatgagaccaaagaggaacgtgggagccatttgaaggagtatcatgtttattatgctgaagagttcaattttatctctttcctgaaatttccatttcttccctgtctcaatcagcttgggctgctataacaaattacaatagactgggtggcttaaactacaaacatttatttcttatagttctggaggctgggaagtctaagattaagattcagctctggagggagcctgcttcctggtttgcatatggccatgctgtcattgtatcctcacattgtatgtgtgagagagaggaggcaagctctcatgtctcttgttataagggcactaattctattcatgaagatttcatcatcatgacctaattacttcccaaaggccccacctcctaataccatcacatggggtgttagggcttcaacatatgacttttgggaggatacaaacattgagtccttaacatccccaatctgtgtttcccagtgagttctatgcaggtgcaatgaagtccataaactcttcccaaactatgttatcctttagaacagttgtatgaatttccatagcactggtagtttgggttacgtatctgaaaacataattatacaggtctttcattactcttgaattggatcatgtgagtttattttcacttcctcaatgttatgggttgaattgtgtccctcctaaaagatatgttgaagtcctaatctctggtacttgtgaatgtgaccatttttgaaatagggtctttgcaattataatcaagttaagatgggtcattatggagggttctaatccaagatgactggtgttctcataagaagaggaaagccatgggaagacacagacacaatgggagaaagccttgtgatatcaaaggcagagactgaagtgatgcagttacaagccaaggagtgtcaaggattgctggcaaccatcaaaaactgggaagaggtaaggaaggattctccccttcctgtttcagaggaagcccggctcttcctgatcttagacttctggcttctaaagttttgaggcaataaatttctgtttgcttaagtcacccagtttgtggtactttgttatggcagccctagggaacaaatacagctaattatattgtaagatccttagaggtagaaaaatgatgaaatattttagcatgattacagcatggctcagaaagaggttcgagaaataattggtacgtaaatgttgaatgggtgcatgaaatggagatgggagttcacaatagtcagaagggtgtagagtcacctgtttttcccaaaggctagtactatagagtgctttccttgtgcatctcgttgggccatggaaaagctgtgcttctctgtcacttaacttattcttatcacagtcattcaaagcaaaaataagggcagaacatatacacaattgttaacagaagttatctctaaatggtaatattttgggtaattttgattaaccttttgctttaattatattttctaataaaaaaattatgtattcctttaataattaaaagtatgtattttaaaaatacaaatgtgcttaatatgaaaagacaggctgtgcgtggtggctcatacctgtaatcccagcattttgtgaggtcgaggtgggcagactgcttgaccccaaaagtttgagaccagcctgggcaacatagtgggaccccatctctacaaaaaaatacaaaaattagcccaagtggtcgcacatgcctgtcagctactcaggaggctgagacaggaggatcccttgaacccagtagggcagtgagccatgatcatgcccctgcactccaacctgggcaacagagtgagacccagtctcaaaaaaaaaaaaaaaaaaaaaaaagacagcacatatttattattgactaaatctgtcagcattttgatctacaacaaacacaaattgtgtttttctacagcacatatttattattgactaaatctgtcagcattttgatctacaacaaacacaaattgtgtttttctaaagctctttggggtttcttataaagcaggctttttaaccaatgttttgaacatatcaggttaaggtatgtgaaatagtctctccaggtgggatttaacataatgcaataagaactgaagatttaatagaggatttcttttctaagcacaggaagaatggtgaaagcatttagctttcaccattggccagacagataaaacagacattccctaaagacatcagcaccttagagagaaaatcaaaactactcaacagaaaagtgtgaggcaaggaagagctgcagatagtgtctacaaagggtggctcagcagttctggagtggtttctctcactgcatttcctttccccagaggtccctttggctaaagcactgtccaaaggtcagttgctggaatgagtcgtttagtgctgaggaaccagttgcctgcccaaagagttgctccgccagcagtaggaaaaaaaagaaagtgtgaattcaagtatttcagaaagtttgactcccactttataagagcagggggaaaattcataaagaaagtgaggccattaaagagctggagtttacaggattgtgaagcaggaaaagaagtcagtcttgggaagtaccattaacaaatttagtaacaggctgggcttcagcctcctcttcccttgccacactccacgtaacacagaatgcacaagacaccaagccacatgtgtgatttctctggactcgcacgtgtagggcaagctgatgttcatttgtgaattggatttctcatttgcggactcttatctatgatgcaactagtttcccagacattatgctttgtcttggacagatgttggtgagtgccatgcaagtgccctgggtcaaaaacggtttctcttctcctctgcgccttgggtggatgcagggggctactcatttctcctgagccttttcctttgactatagatgacttacctgtatattcagactctgaattcaataaggttcccttgcctcgaatttgccatttactttggacatggatggaagcttgcaagcgcagagcaccatacaatgaatattttagagcacattaatggtactgttagtatagacagagggcctgccacatagtaggctcgtgaaggctgttgtctgaaaagagcttgctttggggacacaaatcaaactgtatatttggttgataagattcagagatgtgaatccatccacagctaatggatggaccagcgagttagctctggcaatgtcttctctagaacagtggttctcaaaatatactgcacgttataattgcctggagagttttaaaaaattgtaatgcacaggctatttatcataccaaattaaatcagaatccttgaggggtaggacccagtctttggtgtttaaaaaaagttctccaagtaacttcaataagcggccagaattagtcatcactatggagtgacaacatccataaatagccactagtcttatgtgataatttaaatttaagctaatatcacttacaattagtttcttagttgcaatagccaaatttcaagtgctcagtagccacatgtggctagtggccaccacactggagagtgtagagttatggaacgtttacatcattgtggaaatttctgttgcactacttaagagtctagagctctaggtttatactgagttcttcaagctgaatgaatactgaatggccatactaccaaaaagaatttgaagtaaaatattcttgccatagattctttatcttgatacccatctctataagggccaagttacgaggccaggtgcggtggctcacacctgtaatacaagcactttgggaggccgaggtggatggatcactttaagtcaggagatcgagaccagcctggccaacgtggtgaaaccccgcctctactaaaaatacaaaaagtagctgggcatggtggtgcatgcctgtaaggaggctgaggcaggagaatcgcttgtaaccagaggtggaggttgcagtgagccaagatcgcgccactgcactccagcctgggcgacagagtgcgactccatcttaaaaaaaaaaaaaaggccaagttacaactagaaggctgatttagattttttggccaaagttatatgtttcttgagataaagatctgatgcacaactcaaaacagtagtgttttttgttaagcccacagctgtggtcagtgtccatggttatcccataatgactacttccacctcattgccaagctcattaaaaaagaacagtctccacacaatgcagtgttaagtttcggggctcagaaaatccctgagagtattgcaagcttatttctacagattttttttgggggggggggtagatttcactttgtgtacaaatccactttagagctcccccttctctcttaaattctcgaacctgtagaaagcatctaggcatgtcctctttatctcaactctgtacatcagcctgaagcaacttgtcaccagaaaaatggaagatgagaagcagattacctttcaaattcagtaatgcaaattattagatgcagtccttccctggaaaatcatatacacgttagggttctcaacaggctgtctgacttaatcacagtgtatttatttagggatttggttataaaacacttctatagcaacactgtagaatggaccactgtaaggaaaaacacaaaagctggggccagcagtttatcacctggaaatagcatggctttgataatttgactcattatgaactcacagaaatagatctattctcagaaatacatttttaggggcggtgggtgagggacaacagagaaagagtacatccagggaggacgctgatctctctgctctttatctaagagagattctcatatgtttgactttttatagattttgccattgagtttcatgattgccaagatgcccagatcaataccttgagggaataccttttggctgaacaacatgacactggagactggcactggttttgaataaaataccagtgaggaaaatttttaaaatactcaatatataattcatctgagaataacaagtgacatgaacaaaaattggctttttaagagatgaggctaagaaccagcttacagcctctcaaaagaccttagttgaatattctttacccaagtcacttctgctgtcactgtctatcctttttaacacacacatacaactccttatgttacagtgagctcttcagagctcctgaagctgccatccaggtattccttgaactgttgtcatcccggaaaattctgaaactttcctagtatttaagtattcatatatccccttttaagtattagtccctatagtagatgcaaaagaataagatacaactctttattttgtaaggacaaatgaatgacatatgtttcaagaataaattctttctctctctccatatatatacatatctcatgaaaatatatctcataaagatatatatttaaaaataaatatatatatttgaatttaaattaatgtcatttaatattaatttcttagctgcaaaaaccaaatttcaaaaaatacatacatatacatatatattatatatacatatatacatgtatatatattatatatacatattatatatgtatattatacgtgtgtgtgtatgtatatatatatatatatatataaataaataaataaaattttacaactaacattagccattgaatagtatgaacctagactctggttcttttatctgatgacatgactagaggagggatggccaaataaggtttatctggggtcccaactctgattgattagaactggctgaaggaaggactctgagaccacaactgagcacagcaagaatgagtgctgtgatcaattattgatgtctgcaacaggcaagaggggacatgtgctcaatgggcacatgtggctagtggccgccatattaggcagtgtaaaattatggactatttacataatcgtggaaatttctgttgcaccacttagagtccagagttctagatttcatattgagttcttcaattggaatgaatactgaatggctacactgccacacacacacactctctctctctctctcacacacacacacacacacacacactccacccaattcctttcagagataaaattttgagatttgagaaaagacaaggaagaaaactgcaagtgaaccatatatagaagtagtttctcaattgtaaggtcacccatttcttcctagactttttttgaagaagatgacagttcctcatcctaaccttccaaactttcttggttgaatctgccaggcaactcacatccaatatcctaagagatcacaagcagtcacaatggtagcagacagagctggctagaattggcaagagaggccccatcactgccacccacttctcatttgggccggaatcagatgggttttgttgtctagtagaaggattatctaatttacctctgagtttctctatgtgattcttggagcccagcattctgatgaacgcataaaaggaattttgacttgggttgtgctaatcctccttacacatctgtgctgcctagaggtgattcacttctttagaatccctccaataatattattatttttctaagcgtctggaaggtagtgtctttgtttgctagggttgtctgcatttgaaaacaagttaatcaacatgcattatatatatatacacatttatatatatatatacatgtgtatatatatgtgtatatataatatatacatgtatataatatatacacgtgtatatattatatataaagcatatataaatgtatacaatatattatatataatgtatatattatattatatatgtatataatgtatatgtattatgcacatgtatatgtattacattatatatacacgtatatgtattatattttatatgtatataacgtgatatatgcgcctaaatagactgtggttcttttatctgatgagatgactagaggagggatggccaaataaggtttatctggggtcccaactctgattgattggaattggctgaaggaaggacactgagaccacaactgagcacagcaagaatgagtgctgtgatcaattattgatgtctgcaacaggcaagaggggaagatgtggctggctatctgcataccagatagtccccatcttaataaagaatgaagcttgtggaggggacagtgggagatagggctgcgtagagtggttggatttgtgttcaaagcgccctgagaagtctgtactgaattccttaggcagtggggagtggaagagtcttgagcattatagcaatatgacaacatctgaacttttaggaagcaaacttggccatatgtaagatggactgaagtgggggaggataaccaataaactaggagcttaaataagaaaaggtaaggacagtgcagatgtgggaacattagaactgccttggagcaaatgataaccatgagattcccattttggatgattgagagggtgttttaatttataatgaaggtaattaatttatagagagttgtattctttttatctgttttcatgtagagtgcttattacagtatagatgttataaacatgtttattgagtaatatatgataataaattaatgaatgaatgaaagagtaagtgaaagttaggaggaggagctggttttgaggaaaagaggacaagttatattttatacattctaagtttcaggtgttggcagggccctctgtagagatgtccccagttcagacatagctttccagtcctcttcaaacctaccattataccactgctgggttgtgggttctcccctctaaacgactacttcctgcatatcactttccatatagctgatttatgattttcttttagaaaaccatgccggtgatctttacctatgtaaaacagttacaatttattgaggagtccattatgtgatatcatttgtgatacaatgtatcattgaatctttatggctccctaatattggggacaatattataccccttctactgaggttactaactcaagtagtagagttgagattcaaatccaagttgccttccttctaaattttacccctgtttgtttccccacactgtctctcactactaagtgatacattctagaaaatgctcatgccatgcttctgatctcatgttaaccaacggtgcctagtggaacctcattacccccggcatttcccatactcctctcccatttacccatttctctcatccatgattttctgaccaattagccagtctgtcctacattatacccatctctcttcttattgcatgtgcatcctcttttatgcattcacttctactcctatttctcactttagtacgtacatgtacgtgtgcataatgatcacatgcttttgaagtggtattaagagagtttgcacaaaaattgtgggacagatatgggtataatgtggtgtgtgttcacccaaagctgttggctttaatcaggattgcaaagctatacacacaggacataacagtttatcttggaaaattagtggttgggaacatctcgatggtggacttgtttcaaactaaacacctcttcctcaaccttcagtgcccttctgcagagctgttagtgcatgagtactgtgagatgcgtccttgttacatgctacaagtagcccctcaggtagaagccagtgtttccaaatgtctacataactaggtcaaattacatccagagctaggctgtgttgctctgatgtgtttacacttattttccattgaatctaagtttctaatgttttaggtcactaacaatgaatccaacatctgacattttatgagtggtgggatgttatcaatccttcagcaagttttgatgttttttttatgacttctggcaagctggagtcattaggatttattaccagaaaagggaacaaatactgttgttttactgtgttcgacgtatagtagctgaaagtagagtattttcaagacctatgttccttttgaaataaaaagttcctaggtcttgccttggtctttgggttggctgggcatgcagtacactgcactgaactcactggtgtgatggaccccgttcacgcaccactccagaccttcctggctcagtgcctgggagtttgtcttgcttctgggtctgggtggccttggaaatggggcaaaggatactgtcataaagccacagctgctgctattgccatcacagaccaaagaattcccatgtgtgatgctcactgacaagaggagtcagctgtacctatgtgctacttggccagaacttagagatgcttggatttcccagtggctacctgggggttccaggtaacaacttgcaagtgcagggggaattaatactgtattgggtgaacttttgatcaatgagaggcagtggatagggagaatccagcagataagttgcttgcctttgttctaagacacagcagattcgtacagcttttctgtgtatgtcctgagagagcaaaggcttagctaagtttctcatgagctgtgactagctctgtgccttttcttttgctttcacttttacttccttgggactgtacaccctgttgccccaccccaaaaagcatataagcttttgagtcaagtttttttttaatttttttttaatcatcttaggctaagacactttttgtcccttctgttagatttgaactcttggaggactgaggccatgtcattttcatgtttctcttgattgcatctagatatttattgaaaccatgtttgctgaatgacaatgtctggcttaccacccaaaggaagttcaacaaaggggagcagaatccctcaattcagggtggctttgacattcatgtcacacccaacctgccacacaaatattggtccagctcgctgtgtcttggcaggtgatggaagcttggccttggaggcaccaaggagctaagaggactccatgatatgaacacaaaggtcgattcacatgctggtgctttagggggcattaaaaccattccagagaagcaggaataaagaatataggagcatctttgtggacactgggtctgcaggtctagcagtaacagaggagggcataatggattcatgaggtcaaagctgggatggaccttgactgtaatgaaaagaggccatgagggtgtgaatcagggaaagaggatgaaggcaggggtgggagttgtgttgaacaattggcagatgatccaggaggcttcataggttgaagactttcagctactcattaggaaacagcaggcatattccttcatttttcccctttttcattttttagacttccccatattcattttccctctctctcccttactgctattattttttcatgtttttgattctgtctttattctacatttgatgattcaaaatgtgacatctttacatttaatgaattcttaacccagtggtatatgttttgaagagtgaaattaataaagaggcttagagagcaaatagaaatacacttctataatgaaaataatctgtcactcatgcgttagctgattctagttgatgtgttctttgggagcctgaagacaaccgagaaatgggtcctacagctgtgagctctccttccactgccatgatttccttcacggagtcatagcattgctgattcctaactgggatgtggttggacttaaaccttggtttaaatcctgactctgatatccaaacatcctaagagtcaagtgcctggtttcttagtttctgattttttacacagataataccttcacaaacacatacggtatatggaagttgaagaaagaaatgaaataatgtttaaatatgactttgaacatattcaacaaaactctcgggttcaggaattttagtattgtggtaagaatatgattgctgtgaatgacaataatagttgagctagcccttcagtgaacaagttgagacactttttttttttgtaacctggttaacatagggtttctcaacctcagaactcttgacattttgggctggatgaatcattgctgtggagagctatgctgtgtattgtaggatgttttggctcatccctaacccctacctattagatgccattagcctcccctactcctgatgtcacatccaaaaatgtctcctgacattgccaaatgtcccttcctgggtaaaatctttcccaggtgagaaccactgggatacagcatgtccactagagctatagttttcctccttatattaacgtgttgactaaaacttaaaaagcaaacataatagatacctccaaacagcaaatgggctaatgcagttggtatacacaacagtacatctgccaatgtttatacatagcacacggctgtactcagctgcagccagtgacaaacagaattcggagtttactttcagtccacactaagaggtgactaacatggcgggataaaaagccaggagaccccccttcccagaagcccccctttgaatcacaacacatatgtgagtaatgactgtgaattgaatttatgactcaagtgctgtttgtctgcatacatcaaataaaatttgagacttaaagacacaagctgccatgttcgtttcccccctcatattcatttgtgataactacttagaattcagcccccctcttttttaaaaaaaaatagcactctgtcatttccagaaaatgttttaaattagtacaaaacttggctaaatttagcttttatagaagaaagaataaaacataattaactgtttaaagaagaaaacagaaaccacatgaaggaatgagacttgctggcgagaaatctaacagtagtgcttggtagctaacccatctcctgtgtaacagatgttcacgaatttaaatggaaacaggatgggcgtccccatagaaggcatttgtgataaaaagctgctaactgtgtaaatgtacgaggctgctacaggtgtggcatctcatctaattgcccagggatgggactgcaagaacactcgaatgcacaaagcaaaagaaagtctcagcatggcaagaaatatcgacagatagaacgcttagcaggatcctggccgggagaccccatgggtgcagtctgcttgctgtaattgccggctggagtggaaaagaaaagactctgttttaaagctctcgaagcattcgtctctggttttagcagaacatataacatcttctgtaatttctatgtaaatacttgacagttgaaaagaattctttttttttcttcctatccagactataatttatggtggtttagtgggaaaaggggttaatttgatttaaaaactgaaaatgattctctatttggctttttaaaaagtatttatttaaaaaactctgcacagaacagacagaggggagacaaaggattctattgtatgactgacctaggcgtgccatgtctctttgctccctacacagacagaggcctggcctgaagcacgcaagattatgcacacatgggtccaatctttgtcacctgtcacctaataaagcctcactgaatcaaagactaggttatcatttattctgctggactgacttatgcaacattctctgtttaatgtcatcttttcttaatactcaattattattattattgttattgttactgtaatatttaaaaacacagatggacctgggaacatgccattgtaacattgtggccatcagccaaaaaaaaaaaaaaaaaaggtacaataatctattgttgagctggaactcctccagtgactcataggctctggggataatgtctctgaaatcatgcctataagttaatcgatgaagttttcttttattcctcagtatatacattttatctcctttgtaagatacaacttaataataaattaaataactatcaagcatattgcaagattaccttattaacagtcactttttatgtgaagtcgctctaaatattcaaggaatagtttctttccattggaaaaaatttctgagaaattggatcagaaagttttttgaggctcaatgtggggttctgggctcatcttttatacctgcttctatgaggtggtgcagtttcccatgaaaaaaaaaaaaaccagaaagaaaagatacaataccctgttgcctgggtgcaggaagaaagagaacatccccgctgacccagtgatcctagttttctcctgcctttccggagattttcaacagaaaatgccaggcaaggttgagctttctttttctaaaattgttttctctttgactcatggatttaatggtaacacaaaaggtccccttctctagaagaaattggaagttaaatttatcatctcttcttttacatattttccccaacatgccaaatcttagttcattgagggcttcgataatgcaggcagtcctgcatttcagatatgcatagtgccgtgccatttagtgacatgtatgggttctgcagtttacattttgattaataggagcaattaataaatcatgagttacataatatccacacagtgaaaagcctcaaagttaccatgaagtgattgagatattaaatgcctatatgtattgaatatgatttttttgaagtagtctcatgccagttatcttcccaggagaagtaaaattgttctgcttatcttctttcactgagtcatccccatcaaaacaacaagtaagtgactcctcctcagaacttaatatttaactaaactctttcagttactaattaagggataaattaggttcctattagaatgaaaaatcggaatggctttattctctcttaaccttagatacattctctcagtctaatatcttgctcagggtctaatgcagacaagttttattttatagttctctcattttctttctgctctgcaatcctcctcctcctcctcttacacctcctccttctcctccttcttcttcctcctccctctcttccttctcctcctcttcctccttcttttattcttggaaattaatgctttgctatatgtggagatcttcctgacctgccaaatgacacatcgtctgaaaatgatgaacacacattgtttaaaaatgaggctggaaacttggcccttcattaaaacctctgtaacagataacattctgtttcttctcagtattttgttgtgcttgatataatcatttattacaatccctattatgtttttgcttgcacatagagtagcagaaggaataaccttctgatagtaacttttcatcagataggctcctgagaataatctgatggtaaaatgtgatcttggttttgttacctatgtgtcaaagtgttgagatcaagggactttattcttccactggcaaaactcatagttacaacatttttctagattcggctcaaacagcggcaaatttcttattttaaatgttcccttcacaaaacttttatagatgaaatgtataaataaatcagatgactagttcatgaacatactctgccagtatctgatactttgtaaaaacaagtaaatggttgctgtatctaatagatgccttctacattagagaatcgtaatggatcaaatgttagattttccacaaaaaattatcctctggaacaaaacagttcaagaaatagaatgtgatactttgctaggctcaacagatacacttttttattctaacagctgcctctgcagacaacagcatcagatgaacaaatattattttcatagcagaaatggtcatgtctgctgggctgccaattgacgatgcagtcattttgcctctgtgtagctttatctactactaaaatagactttgattcttccattggagaagaatataatgatcatgtgtgatatgtaggaaagttacacgttcatagcagaaaacacgtaagagagagtttgcccaggcaaatccgggtccacctgccatatcagaatgagagaagaaagaggggccctctagtctcagtcttgagcaccttaaatacacactagcacttaggccccagggaggtttggaacataagcaccaaaaatccccccactgcaacaggggctaactagagaggacctaaaaaaacctttccatccagggagttgaaacatatctgtgaaaacaatagcttgtagaagctgttgttttagggaagatgtgttagggaagatcccaaccagcgtctataagagtggtttggaaagttctggaacatttcaaatgctgtgatctttgtatcactttgtttccaggtttttttatttttattttttcttcctcccagacaagacctttcaggttagcccaacgattgcgcaacatgtaaccaagcatgcctctccccttcctattttcttttgtttttaatttaaagggaaatcaacagccgccacccatttcatgattgcaatgatgaggctggagcatttcagcctcataacttttctggattcttttccgtgtccaaacagatttttgtaaaaaaatcatgttagttttttctggtacacagtaaattccgatggtttttttgctgtgcatgcctcatgggtggtatgagttgagaaaaaaatgccagaaagtggctactgagaatcttgtggaatggaagctgtcaatgggatggggaaacattaatgctttatgaggaaaattaatgatggcagtttccacatgagccccagcctagacttcttggaccctaagtaaagagttccatgtgatctcccaagtggtacacagccattcgttctttaatgtcccagttaaaagtgttttatgttaatcatcaaaatctagaatttctcaagcgaagttctaaacacacagaaaataataaatggcacccagcaggaataattttcctcatggtttttaacatcagttctctgatagcgcaatgctcatgttcttacatgtatgagtgcaggtgaatacacatatatacatatacattctctaacccagagatgaattaaaaaggagaattttcatcctatgtgctttatgccctaagtcagagttgagggaagaaacaagatcagctacattgagttttattctaggagcaaaaggcttgtaaactcttcagaagtctctcccctaaccagttccacttagccttgaactgtgctgctccccacatgaggtaagaagacgcttcatctagaactttcagaagtggtgcaggaatttagacacacttagggaatagcaggcatctcctccattgatctcagaaacctttggtttgtgtttttggctttttcaaaaatatatttgctcccttcaagttggactgaaataaactcaggtctaggttgccttctcaatggcagcaatgagccagtactattaaaatatcagcacagagaactagaaatgtcggatcttgtcactgccatagaagaattgtggctaccacttctatgcagagtatggaatggtctttcctcaggttcctgtatgctaaaggtccggacagaattactctgtccctttctctagcctcagtcatctgaccagtgtgtgaacaacaagaatatcctctgataagccttcgtccacgattgtgacaaccctgtgttccctctaatgtccaggagtccctctggctccctttagcctctgtgcctccagggtgcctgtggtaggagcagagggagctagtgactccctgctgatgctaaccgtattctaaaccactagtatagtctccctcctttcctcctggaatttctctcttcctgcagcaactcctggaactcctcctgaatacaatccacctgctgttttgtaagaatagctctctgttctttcatgtgggttcggatttttgcccaattcaacacatcctgagcagggcatctaacttcactacacagagagcctggctgtgagacacaaagacctacacaaacatgggaccaaagaaacatactttgctttgtgggtcttaacataatctaccaatcggtctttcaaaattcttgtcttctcatgtatgacatgttaagactcttactaaagaactcacttaaatgtcagcccatatactctacaaaaaaatgttttatctctattcacctccattctttttgaaggtgattttactaaagccagataactgaaatattaatgtatagaatctaatttcttaatggtatggaaggctgaaaatagttttattgtttgatgttgagctatagatgatgatttctttttcttttatttttttccttttttttttttttgaaggttggaagattctttaatgagagacatatgcagcaagttaaagcttgtaagcttacttcatctcagtaatgcagaaaactccttaaactgttgattttcttttggagggcactctgaactatgcaaaatatcatctgattcctcaaggaaaactaggaaacaatgaagaaaaagtaccttcaaactttatgaatgtctcggccaccccctgctgcatccatcaaataccagattgaattagtgagattcaaataccagagattttatggtaatgggatatttagaaatcattccccgaggttccgcctatgttggagtgagcctgtgtgctcacagtgatagaatttggggctagatcccagtgttggttcaattattaggctaggtgatcttccacagcttattttaaattgcagttttccaagatttataagactgcatttttggactttctctaatgcactcaagcaaaaaaaaaaaaatcatttgcctgtacactgatgactatacctggtaaggctatataaatgtgtacaaatttgtaccaatactttaactttattggttcacttgcaggtttcatagtcacttgaccgtcattcaccatttacctccagatgcctttcttccctctgctctgagctcaggtacaagtgtccattattgctctaagagctagtcttgactgggcttaattgatatttccattagtctgatgaatacaaatggcattaaataccaggatcagacacaaagtgaatatgagtgatcctttgcagccacctgggaagggtgagtggggatttttaaggcatagtggtgaggacaattagcagggctaatgtaccctttccatggttgagatgacaccagatgcccctctcttgctggcattcagtgcacaatgaagtctgcattgatctagatggcaaaccacattggtttcagagccaggaggctccactcagcatggcacaactttgtgttatgagaggaaaagagtgaggcagcaagtgagcttagagccttgggtcaggttgaaggaaagtttccctctttctccccggaccagatgcacatatcaactgtgaaccctgaagtcaagtcaagctcctaggactgcctccctgtgttgggctgagggcagcgagtacgccttggcagcttttaacccgtgtcccttctgcctgcattggcacgcggtcaatctctgagcagttgggggatatggaaagcataaaggggaaggatccacagggacaatcaatcatgtcatcaagatcagcttctgaaggaaacaagcacaaatgcttcagtgaaaacaaactaatttcattctgactgttctactgttcggggttttatgactgtgtttttcaccctgtgtggaaaaatacaaagaactgcccaggaactgaaaaacagaaaagaatctgtcttgaggaacatttccccctttaacttctttgctgtctttaccagatgtacccatccaggctccaacatgaaccacacaatggaccttaggcccattccagcacacaataactcaacaaaggatgcttaaaacattaaaaggatctttactatcctcttggcaaagtacttcacatgaattgccagttttccagttgttacaccaaagaaagataaggggatcaacggatcaaaatccatcttacttcatacaaaagacagaagttgttatagaaagccaatatggcttggggagggaacatggagtcagtcccggtgtggggtcaatgattttaccaggtgatattccttcagttgtttatgttgatgttttttcaccccctaaagagactcagagataaataaaattcagtctttggggttgctctaaagcactcaagtaaaaattacctgattattggcaactggattttgcaaaattgtggggagaaaatttggaaccctcgcaaatcctcctacacaaatgttgagctaaatattttcactttatgctcgcctgacagagatagtagtggtgaaagttacagagagatttgccgatatagagcatttgcttatatcacaccctttctcttttccccaaatcttttcctttttaatagcgtaggaagaaaaaaaaggagtttaaggaaataatttcttgtgcttactatagccctcaagacttttttttactttttaaagatgaggtcttgctctgtcacccaggctggagtgcagtggtgtgatcacagctcactgtaggctcaaactcctgggctcaagtgatcctcctgcctcagcctctcaagtacctgggactacaaatgcatgccaccaggccttactaattatttttgtcttttgtaaaggtggggtctcactatgttggccaggcttgtctcgaactcctggactcaagcagtcctccagctggcctcctaatgtgctgggattacaggcatgagccactgtgcctgtccccaacaattttcttattctttgagtttctcactcgtactaaacaaaactagagaattcccctgaattacacaggaatctgggtaaagttgtatagattcagaccatgtgatacttcttcagccattcttctgagaatttggcaaggagactataagttttgattggttaatatttgtgtgggtacgaatgccagcactgaaatatgtggttaaatattgtattgctttgggtggttggcctcatgtgagtgcttcctctagcacaaatgtcatttggcaaacttggttctcacagttcaaatgaaatctatggaggaagaggagagcctgtcgtctcctcttaggacagatggcacatgctgcagtgtgaatggcagaattggggaggcctaggtctgggtttttgtggctagagaatatactaaccatcagaatcatgttgtggccattaataggattatcttattttcagtaattactaactatactatatgagagacagatagtataataactaatgactaactatatgaaagacagtttaatgttaatacctccactctgaatgaattgcttgtttaacagatggcttctgacttattgggaagttgttagaacatcaaagcacagtttatgaggcctggcaaattatgtatctgagtttagccttttgtttccaatgttaccttctaaatgatctgtttcataactaagattaatatgagcacagttaaataagttatttcatggagaacaggcatgccaatatagatattatcaagatgtataatttgccaaaaatatttgttgagtatctgtgatgtgccagccatacagtggtaaacatttattgatcacttacagatatgaactatagtatgcacacatctacagtttcagatggactatagtatcatagttacataaaatacagccaaaggcatcctagaatttttctttttcaaaaataaaacaattctacaatctcacaaacatattcgggtccatttctctgtgcttacaaacatgctcaggcttgcccaatgagtggaacccaccatcctttgaccttggccttgcagcctagtttctttgagagtacattttcccctaccaactcctccgccacataccccacaaaaagcagcctcattttccacctccaaattctcactatcttccactcctcagccccaggaacctgctttttactcccactgctctcctgaaattgctttctcaaatgtcaaagtaccaccagttgattcaattcttccctcccagacttctctgcaacacccttgaaaatgccctccttgaaaagctctctatccttggtatgttctccacactgtggcaactcgagacttttcttcacctctctgacagttcctttcatcttctttgttcttgctccctaaagtaagattctttaaggctttctttgctctctgtgtacaaccttcttgtagaattgggtatttcctgggctttgactattgtatctatgaatgtgaactatcgaagctctttctccagatctggcttctcttcagactccagtcccatgtcttcatttgctacctggaagcctcacctcatgatgagtttgggaactcaacatatcccaaagcaaactcattgactgcttctcaccaaggatcttctcttcctggttttccaggtttggatgcgttctcctgttctcctagagggttctccctcttaattagttgcccaattctgtccattctaccttcactataacaagtgactgtcccacttttagttagtcctgccacctcctctcttcagctcttcatgaattccctctctgaactgctctccctcatgccagtctctttccactctgttccgtgcctcacacgttttgcagatgaaccttgccaaagaaatgatatcactgtgacatttctgtcttcacaaatgccttattctatcctgaccctccaaattaatgtttttaaccttttctcctgctctttctcaagcatgtagccatggtcccacaaataccatgggcttggggggaggttcagatcacatagcacattcccctctctgtccccttgtatatgcccctagagctgtgtggactctcctccttcacacttctgcacttgccatccttcaaggcccagttctgttgacatagtctccaggaagacttcctcttttggtgatgtttgagaagttacaataaggtgctgtacttttccatagctcggcttgattcatgtgctatataaaaaaaaagactgtagagggtctcatagcaatacagcaacaggtggttgatgaatcaatttaggaagtggctgctgggggcagagctttatttatcaaagggtacagctttgcaagctgagtgtacaagagcttcctgggtcagggctgtctggtgacctacagacatggatggggtggcagtcataagtgagtttgggctgtgacattttggctttctctaggttttctcatttatcacaaagggactggtaattcctatgtgactctacatgtaggcatcacatgtcgctgagctccagagaaaaggcaagctcgtccaccttcagactcatgcacttgcatcccactaggtcctcccttgggtctgtaatgagctacttctcctcaccttagttaagcagtttcattctttacagaccacctcaaaggccaattctaccatggtctttcttcaacccatagtcataacactctctccctcttctggtcacacatggcactctatctgtgcctcaagtggttcaatgactgttctccctggctttgcatgtgtcatcttaccaaatggattataagatgtttgagtctggagactaaattttatttattattataatgcacaatatagccctgtgttcatagctggaatttaatacatgttagttgaataaacattgaaggatgaagtttcagatttttttggctaccattactctcagctatgttgatgtaatgaaacacgtgtgccatataaacatgtatctatttaccaatctgctgctcaaattgatgactttttacaaggcttctaggtggggcagcttttagaataaagatgaacacccacacgcacactcttacatgagtgactgaacaatctcacattttattatttatagaaatacatgtgaatatgctacaacttaatttatttcctgcaagcagaaatccttatcattataaggaagcccctgtcttttgtttttgtccattttttcccctgatgtgttcataaacatgtcccatggatggcaggaatgcacagctatttcactggtggtataaatagttttcacagaagccctgtctatcatggtaaatggcacaaaagacttttttcctccacagaagcctttatttttctccctgtatttccctcagaggtccgccacagtctgaagggacttcacagctgtgctgtctacgaacccactcctaacttccaaactttcgccaaagtgtttcctctgaggtccttatagaagcgcttctggacaacgtgggatgttgctaacatttggaaagtgactgtcatgctgcgaggaagtatttgcaggcctctgagttcagtcctccgaggacatttcaccttctttgctctcgtccaagccttagaccccagcacccagtcagctcccctcctgtgggttttccgggctgctgtttcatctctctccccattaccctcatcatccccactcccaccccgacataaattcaaaagaaatctttttttttttttgggggggggtttcacttttgaaatgaaggctcatatttcagctctagatttagaataggtaaatattttttaaaaaatcatttcttcatataaattaaaaagccaaacatcaataagccaaacatcaatagcaacggcaacacctctccaacaacagctgcagaaattgccaacgtgcacctaacctgacctcacggggccatgccgggggccttgtggaagaggatcagtccatctctgccccacctcaagcaagagtgacttgcatttcattcctctgtattcattctctcggggttttcagccacaaaagtactttataaaagttctgtataggaacaggctctgagaggagaatttctcagaagaggtccaaggtgctttgcttaaattactcaaggttcaggctctcagggacagggccatggctcacaggcatttgctctggggctgtgagaatgtgggatgagaatgaggtggtatcatttgtggatgtgatggtctacccttccctaatttcctaatttgggaatgactgattgacaaggatggggctacctggagagctaggacagtacagagcagaccacttacagcccatctccagggtgcctaaacaaggggatgtgcagaatttctttcttttttttcctttttcttttgagatggagtttcactcttgtcacccaggctagagtgcagtggcgcggtctcagctcattgcaacctccgcctcccgggctcaagcaattctcctgcttcagcctcctgagtagctgggattacaggagcccgccactgtgcccagctactttttgtgtgtgtgtgtattttaagtagagacagggtttcaccatcttggccaggctggtcttgaactcctgacctcgtaatctgcccacctcggcctcccaaagtgctgggattacaggcgtgagccactgtgcccggccgggatgtgcagaatttcttgcctggagatgttcatttatttccttccctaccccatccccccaaacagctacactgcctggagatttggaagaaagagatgaacagatgtgtgtgatgttttagttacatttgacctaaaagtgggggaaatgagctaaatgacacaccaaagtccttttcactaaacaaccagtatcagtagagcaagttgtttaaatattgccattagcccacttctgaggcttactggagagttttactaatggcaagattcaaaaacagtaacctctgtcttattgaatagacgctccccagctgctgaactgtgaagttaatttctggaaagtgaattgtgtttgtcatttttaaaaatacaattttctgtaataaaagcagagatgcaaccttcagcagagaaacattccaatgtggctgggttgaatgctttgtttggctgaggaatggttaaagtgatgtttgaggatgtaacctaccagtggaatgaggcaagagaactttgcttactacattggcctcccctaggtgtacttgttaattaagagtaaaaccacgaaggtagctccaaccccaatcgctgtggatgccacacccgcgccagcgagggcaggctgatagaggctgtgctaagattgccgtcctgtcacagcgtggagtgggagtgggaagggggcctcctactctcatcgttagccaacgcacaacatatgttcactagtcatatcctttctgtcaagcaaggaactaggccctgggagtacaaggatgaataatacacgaggcccttcttcaaggaatttatagatccttcaggtaaaccatgtgatgtccctccgaactgactggcataaagcggatgatggggctttgacatcttgtgctgagaataacagaatcacggctgaactgacatcataggatcatagaattttataacatgaagcagccttagagatcgttcaccaaattgagttaaaattaaatgattgttatagttccttataaactgccaaatgctaaacaaacatgattattatttggtggaagcccctcaggttttggaaggagagagactgatacaaagttaagtcattgcaacaggtcttctagctacagtgttataggtatagctacattgttacacagctacattgtttaacattcataacccgcatcttattttgttgtttagtacacataagtaatattttatttttcaaattatattataaataacagaaattatgagaaagaaactgtattgaggaaatatgggaaagtaattttgtactgcagatctagagtataatgaacaaaaagagcctataagcaaaaagattcaagctcttaacaaggaaatgccttgtacataactgcacatataggctgggctcagtggctcatgcctgtaataccagcactttgggaggccgaggcaggtggatcacttgaggtcaggagttcaagaccagcccggccaacacggcaaaaccccatctctactaaatacaaaaattagctgcgcatggtggcgggtgcctgtagtctcagctattcaggaggctgaggtaggagaatcacttgaaaccagaggtggaggttgcagtgatctgagatcttgccactgcactccagcctgggaaacagctagactttgtctcagaaaaaaattgcacacatagttaggtgatgacttagttacatttcagagaggatatgtggtaggcagagtacctgtggatggccccccaagatttcccaccataagacccacaggtgtccatctctgtgctaacttccagcgtggtttaggggaggcactgacactctgcagaatcccagaaaatataattaaagttctgtttataaatcctttattgacatttagtgaacgattgcagtgctactgatgtagtgctctttaatagctcattatgaagtttgttagaagagacattagcagcaatttgtcaatagcctctggaagtcaagtgacaaggtatgcgtgttttacagtgctgccgagtgttagacatatccttgcaggtggggaaacttcatccacttatctgcccaagggatagttcacatggtgactcagatgttttgaagccacaccataatgtgttctaaaagtcggcgagaggtggaatgacagcaatcccaccaaagtggcccctgtcactcaaacttgagaagctgcatggaattccttttgtgtcattctaaaaaactataattcttttgaataggataatttcttttaaaaatattatggaagctctttagtttaattagatcccatttgtcaattttggcttttgttgccattgcttttggtgttttagacatgaatctttgcccatgcctatgtcctgaatgggagaaaatttttgcaatctattcatctgacaaagggctaatatccagaatctgtgaagaacttaaacaaatttacaagaaaaaaacaaacaacaccatcaaaaagtgggcaaaggatatgaacagacacttcccaaaagaaatttatgcagccaacagacatatgaaaaaatgctcatcatcactggtcattagagaaatgcaaatcaaaaccacaatgagataccatctcacaccagttagaatggtgatcattaaaaagtcaggaaacaacagatgctggagaggatgtggagaaataggaaagcttttacactgttggtgggaatgtaaattagttaaaccattgtggaagacagtgtggcgatttctcaaggatctagaactagaaataccatttgacccagcaatcccattactgggcatatacccaaaggattataaatcattctactataaagacacatgcacacgtatgtttcttgcggcattattcacaacagcaaagacttggaaccaacccaaatgtccatcaataatagactggataaagaaaatgtggcacatacacaccatggaatactatgcagtcataaaaaggatgagttcatgtcctttgcagggacatggatgaagctggaaatcaccattctcagcaaactatcacaaggacagaaaaccaaacactacatgttctcactcataagtgtgagttgaacaaggagaacacatggacatagggagaggaacatcatccaccggggcctgtcgggggatgggggtctaggggatgaatagcaacccattaggagaaatacctaatttaggtaatgggttgatgggtgcagcaaaccaccatggcacgtgtatacctatgtaacaaaactgcacattctgcacatgtaccctagaacttaaaatataataataataaaaaagaaaatatatacatggctattaaaattggaaaaaaaatagtatggaattggcctgtcattatacgggggtacctgaggtggcaatttggcaccacttggtactttttattcatacgtgataatgtctggcatggaatggggtcaatatatatgctttgaaggagtgaatttatatttaagtttgcaatagctttatgattctacagctctcttatttaattatttcatttaatcatctcttcaacacctctctagaaggtaaaaaataatgttctcattttacagaaaaagaaattgatatttgggacgtttaatataaccaagatgcataggtctgtgcagctgctctttcttctcactttcaggtcataattactgtttgctgggaacatactgggtactggtgttaggcaggtcttttgtttctcattaactacctcctcacaccaggaggtatgtaggtctttttatcttcagatgaagtctcagtgaggttatgtaatttgagctgaatcacacaggctatgtctgatcaagctggcatctaatcgcaaggcttgctactcaagaggatgtggccttcctgccatcacccagctgcccttccaactgaagtataaggctattgctatttccatttttaaaaatctgacaggcacaaagcacaaaggcacaaagacttaagggatggctacagttatgatagttcagtcaagaagtctctgttttggggactttttttttttttaaatctacgttttacagcattattatgcgtctacgtgaacttaatttaatgcaacaagcgttgacaagtgcctgttttgtgcaaattctgtgtgatacccaatgtccatttcctattcttcctttcaaaaagtggccataaacagaaccctgattttgttgaggataacagtgtgcttaggtaagagatgtcatttcccatcatttcatgtagcttggcacagtcgtgtgaataacttctgcatgcaacccccagggaagctttctaaagggccttttccttccctttccttctgactggaatgtggacatgatgtccagagctcaggcagccatcctgggccacaaaacatcattgtgaatggatgccaagtgttggggatgatggagaagaaagatataaggagtctaggtttttgatgacatagtggagctgcccagtcagccttgggctacttacaactggaattaccataagaaagaaataaacttttattttgtttaaatgactactttcttctgatctctaaatgcaacttctaacttatggagttacaggaaagctggaaaagatatatttattagtctttaggaaagacaaatccacaactcactacagtatggtctgaatgtgacttgatccaatgatctaatgaaaacataaactcagtggggagcattccagagagagaagaaattaattctgctaagaagaaggtatcaagaaaagcttgttgtaccttggatggaggaagataagaagtggaacagaaaactcagtaagcaaaagaaagcctggactccaagaagttgagcttaagtgatggcaagttggttgcaaaaaaatggctttgatatttccaaaatgattttctttaagttttcagcaaagcattgactagtcatagacttttagaccttgttctgtggacccagatctaaaccaaactgcaagtttgtgtcacttgagatattatctaccagcacatttaagtctctttctttaaacatatcacttcagtggtgatatcttaagctacagaaagagtcatcttcctttacacatttggctataattgagtagagatgacttttataagattcagtcctacagtcataggcctgggttaaaaagctgtctttgactgaagtgggaggagaaaggagaaaaggagaggggaaatagttatttgggatcccttctgggatatcccttctgactccttgtggcaggagtgattgtctgattgtttcattgcaggggtcaggctggagcagagcctcaaaggcaggagggtaaagaattagggctccaaccccaggggctaacgatgctagggaacttcaggagcttatgacatatccctgacttctccctctggtgttcaacaaatatccatgtaatcctaacctttccttggcctctcttacagttagggcaggaccaactaattagattgtggttaatgggatgtaagtgggaataagctaacctcttccaggttgagaacttaaaggtgtcctatattataatcccacccaccctctctcccctcactgtagtgacattatatcttgaattacagatgccatagctacaaggtgggagcagcctgggaccctgaatcactgcgtggaagagattctcgcagaggagaagttttcaaagcatctgtctttgtgtgagcaggaaataagcgttggtggtatgaagacattgaaacatgggaatatttgtgatggcagctggcattaattactctgattttgacattacttcttggcaaggaaaataagtgagaggtggtgcacctttgatgagaagcatgggattcggagttggaaaatacagccttcagcttgattcctgggtgagtttgggcaagtttcttaacttcttcagccccagatttttatctataaaaatgagaataatggctgtgcctccttcctagggcagttttttatttttcaaagtatggttgcacagaaaacctgcatcagaaatacccacaggactattacactgcaaatcactgtgtgcccatctggaagctaccgaatccagatctttgtgggtgggaggaagtctattttttttttttaaagttatccaggggactcttacacttactaaagttggaggatgattgttctaagcagttgtgaggattgcatgagacaatacgaacaaagactttaggactatatctggcccatggtaagtgctccatatatggaagcaattatttttatcattagagcacactgtggtgtagaataacttggtcagaaaagctaggcaagtccatgaaggggaaaaagggagatggcattactctttctcaggattataactctgaactcaaagggagccaagagggcaggcacactgaatgtaacccgatttgacttaaacggaagactgaggcaaatcattgatgtgttgagtattcagcaacagaataacaacctgaaaacagatgaaggagaaggttgctgtcctaacagcaaaatcccttaagactcccaggctttccgaaggtgaatttttaagcattgatggaaatgcgttaatgagcatataaaattgtggttgaatggtgaccaccatgcctgaagctctgttgaaaaattattgacagctatattgcttattcctgtagtggttaggaaatgaaatgcctttctctaatcaagtaattgcattaaggagctactgggaacatttggttgcttttccggaataggcaagaagtcaactgcacttcaaccaggttaactgtcaagaggagtttggctcaaatttcttttagttcaactaacatcttttttttcctcatgcatatgcaagcaaaagtataaaaataaattcagctaatagccaaaacaaaacagcacatttgtagtaaatcctgcctgtttctgaaataaaattcagcaaaagatgtgtttttgttttttctgtttaagggagagatggtggagatgtgggttttggcacaaaccttaaaccctaaaatgagctgcaacacaggtggagtgagatggatttccagtgactaaggcagacagcgtcatgcccagctttaactgtgtgaagattcattgtgaattttgccatagcccaagcagaaagaagatacattttctggttacaatagttttggttggcagaatttacctgaaaattcactcaaaaaagtctctcatttgaaagatgaactggtagagaattgtgaacatacagaacaaggatataagtagacagaacacagtcatttttttgttgaagttgttactgtgaaatttcaagctccttgggtcttcgaaaggccacttttatgtctgcagctccatagagatacaaccactgaaataaaaaacacagtgactgggccattttgtttacacagtgccacattcttggccagtcttgtttgtcaccaaatggcctgatgaatgctgttttgatgtcacgccctagataccactttgtgtttttgtgctcttgggcatgaatgggtgactagctcactcatgggctgtggctctaaggcccctggttactgagcaaagttgatctgaattgctagaacatttgagcccatttgccccatcctgctcgttctcctcctcttcctctttttctctcccatatatacagtgatatgcagggcataccactacatcatagatctcagtcctcaaagcttacaaaattacttccatttgtgaggtaaactaactcttgttcctcagtcttgaatttacccaccaggcttgctgcaaagaatgagcttaaaaataacctgatgatttccacgtggcagggccacgggttacagagcacagcctgtgcccctaggacaggcacccacattgttctttttggaaggagtggatctgatgccagggaaaggtgacacaagaaagaagctggccacgaagcctctgagctttgtgacctgatgctcacctgacgcatggccaggctgtctcctctctgccaaatagggagagaaactctgacttggccgacatcgtgggtgtgttaggtaatatttgccaactgctttgaagatgaaaagcgttatggggcactaaatgtgataattatcaattataaaacctcactactccctggaacactaggggcgaatgagcaggaaatataaatgtttgtgacaggaagccaggagccaggatggctcgtgaaatgtgaaaagttcaacacacagtgcccttacctggggcaagccaggaactcatttgtctttggaaggtaaatgcttccttgagctaacgaggtggccccctgagagactaccttattaagtactcctggaattctgggcaaggggtgcctgtgtacctctccagtgccacctgggtgccatgaaaaaaatgtcccacttggagtttggcctgggcttttccctcatcctttctctattatccgaggataacagggtgatagactgaagacctctgggccgttcagatattcgtacattctagacacacatcatgatgatattcacacatcataatcattgagcttttgcaaggatcccggaatgaggcacacacctcctctggccatttgattgtgtttataaactgaagtgttcttgtcttggaaatctttagccttttcagggtcatctggaatcccgaggctgatgtcatgtccggctatcggcacatgtagtgtaggcagtttactctatggcttcatctgaggggtatggggcaggatgtctgtcccagtagccaacccttttgcccgtcaggccaccaatgggaatttctcttgccagtggtttgtttgtacaagtctcccaacaaatgcatccttgtaaaggatggcggtaaaataataactccttctagttcatcttttttgaaagacagacaaatttgggggcactcagaagaattacaattatttacctcctgtgagataaagggctgtctaacaggctgatgtgtggccaggacaaaacagagcagaaacagtgcccattactgagcaagtagacaacacgggactccaagtctagacactgccagcgcccagctgtgtgcttatggcgaaccccttcccctcccctacagaggctcagtgaacattcgtaaaatgaaaccagcccagctaggcaaatgattttaagtccttccttgctctaaagactcaaacaaatttacaagaaaaaaacaaacaaccccatcaaaaagtgggcaaaggatatgaacagacacttctcaaaagaagacatttatgcagccaaaagacacatgaaaaaatgctcatcatcactggccatcagagaaatgcaaatcaaaaccacagtgagataccatctcacaccagttagaatggcgatcattcaaaagtcaggaaacaacagatgctggagaggatgtggagaaataggaacacttttacactgttggtgggactgtaaactagttcaaccattgttgaagtcagtgtggtgattcctcagggatctagaactagaaataccatttgacccagccatccctttactgggtatatacccaaaggactataaatcatgctgctataaagacacatgcacacgtatgtttattgcggcactattcacaatagcaaagacttggaaccaacccaaatgtccaacaatgatagactggattaagaaaatgtggcacatatacaccatggaatactatgcagccataaaaaaggatgagttcatgtcctttgtagggacatggatgaaactggaaatcatcattctcagtaaactatcgcaaagacaaaaaaccaaacaccgcatgttctcactcatagatgggaattgaacaatgagaacacatggacacaggaaggggaacatcacactctggggactgttgtggggtggggggagtggggagggatagcattaggagatatacctaatgctaaatgacgagttaatgggtgcagcacaccagcctggcacatgtatacatatgtaactaacctgcacattgtgcacatgtaccctaaaacttaaagtataataataaaaaaagacatatccaaaaaaaaaaagactcaatgttttttgagctacaggtctccagtggtattgttaggggaacaaagaagtgcactgtgactttcctgggagaagctaccagctgcgtgaccctgggcaaggtacgcaagctctctgtccctcagttccttcacctcaaaatggggataacaatgtatctacctcataggattctgaggattacacaagctaatactaaggcatggagaacagtgcctagcacatcataaatgcagtgtggatgttggtgaataaatagaaagaaaataaactacagattcctttggcagttagagagagacacagagttaaggccctgaagtgcattaaaaataagaccagaagagagaagataagaagacctgaacgtactaaagaagcaaatatttagaaaaagttaaggagctggaagcatctcatccgggttgggatgagtggtggtgggtggttcatttctttaggaacctgagtacctgagggagaaagctcagctgggaactggagttagaaggaaaaagtatcaagagcactgagtgcctccagctggtcctaaagctgataagcctagtcttctggggagaggctgatccctgctgggaacccatcagtactgaggaagaacagtgaggactagagaaggagcaattgtgcagggtgggcaacctagtaacagggtcaagggggctacctggatgaggaggggagcaccaggggtgtaggactgggctggcaggtgaggttatgttcagagggctccagtgggaaatctggcatgtggaggtcggcttgcacagggggtcagcgagcagagacacagaagagcagaactcagtaacacaggcaggggtccagcaccagatcggggcatcggtcacaagagagaagcttggggcaaaatctgggaatttccaggaacacagctgttctgtgtgtggtagagactcaaccatgtgttcaccaaatccatttcctgttcttcctgggtccatgactacagaaatgtcctgggctccctgctgccccggctcccgataggtggaagctggcttgtgactgagtctgaccagtggactatgaacagaagtggggagcatcccaggcttggtcccaaaggctcccctgcaagatcctccactcttaccctttcctgctgactgggtgcagaccaacatgacacgtttgggagatggaagagccatggatggaagaagcttgggtcactgaatctgatttggaacacctattttggaacatactgcaataactacttagatttctggattttgttgttacatctgtcagtgttataaatgtaaaccagtaagctgaggctttcatggatagaatcaatcaaaggttaaggtcaaagacattctgagacttgcccagccttaagatgaagcaatagagggccctttggtgcttggtggctgcaaccgtggctgagttctaggaggcagtttattttttgttgcttgtgtataatttttaccccaagaatcccttatggtgctggctgtgaccgatgaacaaactcttagtgtttaatgtgtgtgtctgtaaacacagggagaagggaaagctgcctgaagattggacaaagagccttgtaaatgtcttggggtgaatgacaatgggaagattaggaggagtctgctggggagctgcctgcaaaggtcccctcttattcaggaattgtatcatcagctgagtcctttggaattagcagacagttgtgaagataaaatagtcttgtagcataagaagccgtaggtagtctgggagctataaaagctcctcattagtgacaagattttaacaaaaccaaataaactttaagaaacaaggacattcatggctgggcgtggtggctcacgcctgtaatcccagcactttgggaggctgagatggatggatcatgaggtcaggaaatcgagaccatcctggccaacatggtgaaaccccgtctctactaaaacacaaaaaattagccggacgtggtggcatatgcctgtagtcccagctactcaggaggctgaagcaggggaggcggatgttacagtgagctgagattgcgccactgcactccagcctggtgacagagcaagactctatctcaaaataataataataataatgataataataataataataacaataacagaaacaaggacattcatacgttttctaaatattttgactcactacatgagagagtgacaaattgtgatatctgaagaaaagtctgggtaaaatttccacaacagactttgcaatttagtgattctgatcatctgaacttcagttccttgtagcttgtgaagagcctatcactttctttaacaatgtattagcaggacagaggaaagtgactttaaggcaagcagtagcagctcgtatattttactaataacgacacctggccgtaagtcaggcggttacagtccctaggtgagcaacaattttagtcatgacacacagacaatattctttgccaaataaattttccataagaagagggaggaccaggcatatttggtgttgaaggattgattcctatttttcagtaaattatgtctctgaattagtgtgcttctgtcagtatgcattctggtacattcaacagttcttattgtttttagtggaatttttttttctttttccttttgtgagacagagtctcactctgtcaccgaggctggagtgcagtggcataatcacaactcactgtagcctcaatctcctgggctcaagtgatcctcccatttcagcctcctgagtagctgggactacaggtgcatgccaccttgcctgattaatttttgaaaaaaaattttttgtagagacttgctatgttgcccaggctggtttcaaactcctgggcttaagtgatcctcctgccttggcctcccaaagtgttgagattataagcatgtgccactgtgcccagctgtaagttgtatttaaattcttttttttccatttatagattgttttgatgtttgagaagttcattgcactgtttgctcccactaaatatttttaaacatttaggaagaagaggctgtgtttcgcctgaggcaaaggactgagaactccacaactaagagtttgtttagaactcaaaacaggatgttctgtttgaccaaaagaaagtttctttctctgcttttcattctcctgttaactcttcccttttgctagcatataaaagataatatcaccaaacagccagtaaaggaacgacttataaaaatttgtagtaatctggcaagatttttcccttctattttgttaaatcttaagattgctcaaccattgatgtgattgttgtttgtgtgttttttctttaccacgccaccctggcattttgaggctgtgcttgggtgaaaaagttaagccaaaagatctcggctatacagtccaaatccagatttatgcaccacgcaagtttccactccctcgttcacagacatacgcattcgcgttgcaatcattttgcaaagggtgattcagagatggggaacatggcgtttcttctgagaagcaaatgagtaggttgacccacagtgctcactttcctgcctcaccgttgtcactgtcctgacaaccttggtgagtttggctatgggaataaaatctgaatatgtattcttgaactttgccaccacatcacaggcctgccctattatcatctaagagagcccccagcaaacggagggaaggaggaaacacccttgcccaacatcagcactttgttctcaatgagttttaaaagctccgaaggcggttctaaggagcagtcaaggctgagaactctgttaacagagcacaggttagactgcagtcctcctgggacagggctgggactctggtgtttgtatctttaagcgctcagcccagcaggcagcacagaagaaacgcccacgaagaacctagggtgcgaaggagcacactctttggtttccaaagaccagtcctggcttccctgaaccctgaaccactgctctgtgtttatggccaactgggacgaaggtgctgggtccacgtggaagatgacactcctccccccggcacatctgcagagaggctgtccaggacagtagtggccttttaaagctcctgcagagaggagtccttgtaagaccaggttgctgctacgtgaggatgaaaaagcccagaactgagagtcgtctctcgtcctagtttggccactgactgagcagctcagtattggtcactgaacctcaatgttttcaaatatgatgtgagctggttgcactcagaggttcaacatccatccttctatttgcccagcaaccatgggagaaggagaagaaaagacctgaaataagggaactttgacagccaagggtggcctttgattctccctcccttgatctgtaagttgttcaagctatagtccacccccaagaagtatcacaactgggcaggtccggaggcgagacaagatgtggattttgacggtgaatcaatggggcattattcagcacagctgtctctaccccgacgctgaaacagggagatccagagcacagttaatgtgagagcagattcctccagaagggaggctttcgagagacccactgggcctgactgtcaggtacaaggaaccctgagcctggcacaagcaagcagcacacctgatctctgtatattctaagagcctgcatgcctcaatttcaaatagataaagtttatcatgtagatggaagattgggatggcattcattcattcattcattcattccaggttttacccctgtactcacagaactgatgagggagaggaagtatcagccactgcgataagggtctagcccagttgggggatacgtgctgaccactggaggaacagagaacaaccaacaaactcaaccaagtgacctggaacaagtgatgccaacagcagcaccatggaagctgaactcaagaagttcagatgggacgggcacggtggctcacgcctgtaattccagcactatgggaggccgaggtgagcagattactaggtcaggagatcgagaccatcctggctaacatggtgaaaccccatctctactaaaaatacaaaaaattagccaggcatggtggcacacgcctgtagtcccagctactcgggaggctgaggcaggagaaccgcttgaacccgggaggcagaggttgcagtgagccgagattgcaccactgcactccagcctgagcgacagagcgagactccatctcaaaaaaaaaaaaaaaagaaaagaaaagaagttcagatgacaaaggaaggttgtgtgctttttggcatgaaaggacattttggtactaatctagaattacagacacgccctatgccttcatgttgaagaagtacaaagttgagggaggcagaggtgaggaatcagccttgtaggtggtgatgtctcagagaggagcaaagagtaaggaaaagtagtatgatggtttctgatccagtgtctgccacaaaccagctttgtgaccaggtgaattatgtcctctgggcctcagcttcctcacctgcgcattgaatgcaaaatacctatgatctcttctgacttgccctgagggcatgatggctggctagacaagcaccaacacccacaatgctctcagcacacacgtacacacaggctcacactcacacgcatgcacacttatgcttgcacctatgtgcttgtacacatgcatgtactcattcacacacgcaccctaccacacacaagcacactcacatacgtgcacacaccaatgtaggcagggatgtgaatacacacacatgctcacacacagccttccatgcacatgctacatccacacatacatgctcatgcacacgcacatacactcctttccatgcactttcacacaagtgcacagtcccccacaacatgcacactctcacatatgcacacatactcatatgctcccgcacgtgcacacacacagcctcacacacatgccaacacactgccatgcacatccacacatctacacacacagatctgagtgccctataatccacactttatttccaaattttcagaaagcagtaacagaccagtcaggaaaggaaaataaaaatcatctggagcgtttttatgcaatcctgatgatctcgcagcctcgggtttagtctctttttccactgcgtagggccagatacttccgtttttacataggtacctcttttagggagacaaagcattaagagcaatgagccaagagaagaatttgaaacaaaagaaaaaaacacgaaaaagaaaaaaagagaaaaaaagcttttcccattcatggcaaaaaaataaaaaggatgtttggagtgttcatgcaggatatttgtataaagaactgcatgtccttgtttactttctgtggagccccatttcctccctagaattcctggtggtcatactcaccagttatgggactctcgagatgaaaatctgtgacacagagcacacacacacacacccaggcaggggagtcctgtgaagctggatgctctgaaatctagggcatttccgaatcaagtatctacctccttgtgccttgccattctctgacctggccccagagctgcaaagagaagctgaggaggacattgctaagggtcacacctggtgacacctgtgtggcctgtggttaacagtttgggaaagtaagcatcctcactgctgcatgccaggacagggatggctatgtgccagccacatcccagggcggtctcgatggagcagtcccctcctgtgggtctctgatgtccccaggagaaaggcacattggtgaggtctcacattcagttacatagtgctcttgcatttcttaccccacttcatctgcacacttctatacattagatagagccctgttttacagatcagaaaactgaggctgagagtggttaatttgcccaagatcacaaggcaagaaagtagtggagcttaaatttggattttcattatctaagtccaaacgttgttctttaccttgcatcatgaataataattaaaataataataaatgataagcaaacatttttcaagggtttactaagtgcctcacgccactttaagtgcattctatggatcaatttatttaaccttacaatgctatgaggtggatacttttattatccccagttagcagatgtggaaatcaagctccaaatggttaagccacttgcctaaagccacatggccaatgaagggagaagaagatgctttggtttactgccctgctgtccagaggaaggcgtgaggtagcccccaacccacaccccctcattgactgctttcaatgtacaacaccataagtatctcactctgtcatggacattcagagaaggcttcaccccaccaatcaatgacaacttactttttccccaaggatcagataattgatctgattatgcgtttgctgcaaatggaaattaacatcatttgcccttctatttatttttgcttttcccactgaaaatgctattatggttatatacgccataaaagaattgtagtaatgttgtatctacattaatttccacccaagagttttcgattttcactttttatggtgatggaggctacaaacgagagaactgcagtggctgtaaatcgttctcttcatgaaaatgtgccagatgaggtgaaggaaggagagcgcaggggtcctaagagtaagggcatatttaaaaaataaaaaggttattcatgcaattatccaatttcttcagtaagtggaaaaaaatcttagggatgtaatgaaaacacattcacaaacgtgtttttaagaatagtattttcccaggccgggcgcggcggccaaggcgagtggatcatgaagtcaggagatcgagaccagcctggccaacatagtgaaaccctatctctactaaaaatacaaaaaattagccaggcatggtggcaggcgcctgtaatcacagctacttgggaggctgagggaggagaatcgcttgaaactgggaggtggaggttgcagtgagccaaaatcgcatcattgcactccagcccaggcgacagtgtgagactcggtctcaaaaaaaaaaaaaaaaaaaaaaaaaaaaaaaaagaagaatagcgttttcccattgagctttcgtctggactgatggaatcatggatggacccctcaccaggccaccgagactcaactgtgccacgtcagtgtcacgggggaggctgaacttcgccatccagccctgaacacaggatctcagtgttgtctcaaatcagcccttttgcaggcatgcacagggtgtctaagagtctggtgttaagttgaaaaggtctaatgtagtgttttaaagagaaaaggattctccagccccatagtggtgagaagtgacacagagtcacattacataaaatgacgaggcctgaggtgattgtgacagtgagggtgactcattaatcccaacactgggatcctctgagctctccctagcagggtctcaaatgtttgagtgaaagactgcagctagaagactgacaaaaccacactgaactcactagggcaactgcctttatttccaaggcagcttccatcgaagggagtggcaattcatataatcaccaattgctgaaagacatcttttccacgtcagattgaaaccagttttgcagcctccttaatgtaggtgctgtggctgaggcaactagagaaacagtggacgcctccctggccccacttcccagtgccttaaagtctgagaaaaacactgattgacatttccaggctgctgtatttccctcaccagccccaaacgcccgatccagcttcctgcaactgtggcaagggcgtgaatgtccccaggaggcaggttgcagagttgtttagatccaggactgcatcccagtttgtccatctgtgtgtctatgtctgagtgggcgagttgcttctcagctctccgcaggactctggtgttgcttgttgctttggcctggggctgattcctccaaagcaatgtgtctcttcgcagagtctcttagagctgcaaggcagtatgggatcatcagagaggatgctaggaagcttcagaaatggaggtcctggtagaaagggtcctttggcgtggcctctgaagagtccaaatgtgggacaagaccctccgaaagcggtggcctggggagccacaggtggggcagccagcacggaagagggtggctttgctaccattgggaaaacttatcctccacatcctcatgaggcaaacacctttcctaccttaccgctcctcagtggcctccctgttgccttcttattcaagactaagaccctctagaatgttctttatcctgagtccagctgattgtctatactaatatcagtacggggtgtagatgaggacaaccagtgtgcctggctgccaggcaccccctccccaaaccccaggagtttctggaacattccaactctgcttgagggtatccatgcagcatctactactgtgagcaggtggtctgatctgtggaaaacttctatgattcacctgagggtaactgccctttgtgatttgaaagaatgatgctaacagaaagtgttgtcatttctgaacttttctgaactctgcagcgagtgccaaattcatgtattttaggagacctacgtggttctacatgtagctaaaacaattcagtaaccccgccggcaattctgcaatagttcttggagtgatgaaatcaagaaggaagagttctgcctccccatttagaaactgttgagcagaaaggtataagtcaggcttttcctattacaggtctccttcagtgtgaagaggaagttcagttttcatttatctcttgcgccctttgaagtacaggcctctgtctgcttaatggcccaaaccggggcgactacgatgaattccttttacatcaaacacaaccctgtctgaaaaggcagtaatatttctcaacatgtaaacctgccacgactttggtgtttgcaagctgaagatggttacccagtgtggttgctaatggagcaaaaatgcgcatagagcagggagcaggtggaggtgactggggaccctctgacaggttgtctagccacaaacccatctcttctaatccattctactcacagggcaggctgtctcctgcaggggccaacagagaaaaaaaaaacacagaaaatggggatgggagaaagagaggacaagaaaggaagaaaagatgaaacgtggagaaatagcaaaaggaaatgaaaagaactttattgctcagtttcttctgcctgacccaattatcagattttgcatttaagtttaagacagtagatcaaacagcgagaggcactttgtacttctgccaggagaccatatgatatctctcagtgactctcctgcatgccaggaacacggacccatgcctcttagctgggtctgcatatggtgcaatgcataaaaaaaaaacagcaaaattcataaatgactgcactcgtgggtgatgtccaggatttacagcgctttatcagttaaagcaaaaaaaaaacaaaggccaggcagaatctaattataactttccacaaataagtcaaaagtggaatgagaactgaaagaaagacaaaagactggtgtcacgcttactttgcaaaattgatcatcttgaggattgttttatgtgggatacagaacattttacaaggtatggatcatatctgttctggggattttgacatttcttgcagtgaccatgtgcagcctccatagatgtgaagggctggatggcagacgttcatgtcttccttctccaagctatggcttgcctccagagataattactttatgaacacacttgttatgcattgagataatttatgtgggctacggtatttaacactttttcatgccttcagataagactttgtgcagctaaatgaaatagatgctttagaaaggtctcttttcacttcccagaatcatggcaacatcaggaaaaggaacctttcacttcaaggctgggggtatgtcaggagacgtggtggagagatattctactcatcacagcagttagttttggaagcaccacagatgactccaacaccattaagggtggcgaaatcaggttggcaatagcagcacttacttttccaaattaaatcagttcatatgctttgcagattgttcaaattcagcccttttcctgggagaagacagatgtggcagaagaacaggggcactgctgttttattctgatcctggatggctggggttttaagattggcctttgccctcaaaagtcaccttcagccttcagaaaaatccttcagtgttttttcagccctccacttcccttcaccctttacattttacctcactgggctcctacgttggtcagaggtcgtgttccactttggtgcactcttaatgtgtgcatattattctttacatctgcaaactcatttaatccccacactaaccttgtgaggcaggcaccatggttgtgttcttgtatggactatgatggacccactgcacactgatgaaaaccatggccttatgtagcaagaggttaacagttggtcaatctgggtgaagagtatacagccattctttgtattactctcgcaactttcctgtacgttcaaattatttcaaaattaaaagaaaaaaaaaggtctccagagctagataagtttggattgcagtaatggctcaactacttactagctgtttgtaaactaagggttttatatctatcgcccatttgatcctcataaacttataaggttatgttggtatatagtttatgtaggtattatacatttatttcagctgtgtccatgaggaaactgaggctcagggaggtcgaagaatgtgtccaaaatgcctgggattatgtatactatgctgtgcttatctacagtttgaattgacttattagtattaggctcctagagctatgaagaaatacagtgttagatcagttcttttttatcaaagaagattttatgaggacacacagtagctgccaatgaagactctgatcttaaaagatatagcatgtaacttaaaatttcttaacttcccttaattgatttctaaataatagattgataaggagaatcctgggaaaggccaaacattgagaattttgttaatattaattcttccttataatcactctaaagaatgataattcttttgctttatcttaagaaggtactttactatctggatcatttttatcaccttccagatacatttaaaatttttatcagccatccatccatccatccatccatccatccatccatccatccaaccaccatctatcttatccacccacccttccatcatttattatgtatggcgtacatactatgaacaaagtctttgtcaaagaaggaaaggtgcatatctagccttcactgaagtgaaggagggaatacaggcctaactacaccagaaggtagggcacaggttcccatgtgagggcaagagatagggaggtaaactccggcagctcagaggggacagaaaggcttctttggagcccatgaattgcaacaatcaaacctcaagcaccacatattttacagaacaagcataacaacatgttgtgtggttcaccagtgcctaataaaggatttctgtggcctaccctgatgaagcagtggattgcactgatgtcttcactgaggaatgatctcaggcatgattttaatgaccctttgcagggttataactgatctcttagagaccataattttaaaaatatagtttagaacactttctcctgaacacattaacaggccaactttcaagtttacatggcatttttatatccactacccaaatctttctgtagttcattccatttatatggcacctggataagctcatttttaccagaaaaactggaaatttcactgcctgtcctgctctgactttcagatgactcctaaaatattgaactaaggagcccaacattgaccactgggggccttgaattcatacttttcatctagggaaatgtccatttggtttctgccttcatatcaatattctatggcaaaacattttccaattctatggtaattaaataaatagaagttttactaggttccatgacaaataacctctggaagtaaaaattatttatatctctggcctcatgtgtccacttgctcattatctactcaaagaaatgtacaatatacattgccctatacagcaaacaaatgaaaataaccaaaagcaaactcctgttcctaaaaagtatggataaatgcaatttttgctttgtgctttgtcaaatgaatcatatgttaccatcactaaagacatttgctatttgatagaattctgttgtgaatcttatcataaaataaaacatttctcttgattgatcttctgtataagcaaggtgttgaaatgttaggtttagagagacaagactttctacttaaatgaccaagtggtttgggactttgcattgattaactctacaaagaatgagattggtggtgtgcagccttccatacagcaggcatcatttggcaggcatcttcttttataataatcccattgtccagttgcatgcaactggacccacgggttggagagagcctgatgctccctttgacttttctccctcaacatcttgctctgggtgagatcattaatctattatttttacattagtgactcccaaattcatgtctccagcccagaactatttccttggaattctagactgacatttctggagaaccttgagagctcttgttgtgtacttcatggaatcctcaaaaccaatatatcccaaactaatcacttgaatggattccccagctcactagagataggcagtaaggctctttctccctccatctgtctcttagagactatctcatagttttcagtcctgcatgcttatatggacaaagggaggaggcagatgtaggaatcttttattcaggcccctcacatctctaaaagatagtcccactttggtgcctgtgatgttatattgtagtggttggtgtatttgattgtctcccttgctacatagttatcatgccaaggacaaatttttgtctgtgaatggagaagaacgagggaagctcaaatccctgcaacgtactggcttcctgacctggattggacaagtcacataatctttccaggactaatccagtgtcatcatgtgtgggaaatttttgtatgtgaattttatgatactatacatatataagtgatttttaagaggccatttattttctcttacagttttccaaactttgcatgtattgatataataaatgttttatcactgatccaatccattcttcatgcattcatcattacaatcctcctataaatctgcttgtaaatcccaagtactagtttaatttaccaagagaacaacacaaacctccctccatgtcatagaaaactcagtttggagacactttatattaaaccttattcccaaatgtcatcaccacccagggcaaatggctcatctgacactgttagcttctaaggaacattttaatcctttctactattgccagcatagcacatgaatgacaccaaatccactacaagtctccagggagaaatgcatcgctgatatgatggctttatctacatttacacattgaggggaaaattgagcttgttttcatacttccacaagtgcactcttctagcccactttgcctttattatctcaatatttctgatgaatcggaattttggcctggattatccaaagaattgtttcagatctctttgcctccacacgtagatggagctttaggctatgctcctcccaccccttcataaattcatggcttttcaaaaattttcttctctgttttcgtaaaagccaagtgcaaagagagaaactaactgattgtacttcttcttgatatgcctgatagttttctgtcatcttaatcatcacacgagcaagactactcaacacccaggccttctgagatccgaacaataagtaaccaccagtcacctccacacaggctggccaggggtgctcatggggcagagtccatattagctgaagacttgcctgtcctctgccagggaactctacggaaacgagggcaagctttgcatgaaaccccatttgcaaaccgaaaccgtgaaaaaaaaaaaaaggtggttcagtgtggtttttactcaaaaccaggtgaagctttgtggttcagccaagttttgacttgaagccggagagagctcactgtgtttggctggaccttgttttacatttcatgttccatttggttctgtttcccaaacctgaaactgagggttcagatgaggggcacaaaatgaataaaatgaagttgacatgaaatgtggtgtagatgaagacagcaccagctttgtgatgccaactcctgctcctgctctctgccggcactccttctagaaacggccttccccacactaagtagttccctgggacttttctttaaggaacagaatgattaacactatacaaaaatagcaaaggctattttgctcttgtttattttaacagatccattaacaaatctgtttttgtgagtcagccattgagacttttgaggaaaacattttaagtaacagactgtgacgttataatggcatgaatttatttaatatgttttaaatatctactatgtgctagaaattttaacttattaagttctcaccgtattttatagatgtggaaactaggctcagagtgattggataaattgcccatatgctaaaagagaaggcaagcaagtgtaatactaggcagagccagctagatgtggaaactaggctcagagtgattggataaattgcccatatgctaaaagagaaggcaagcaagtgtaatactaggcagagccagctagtaagtggtggaggaaaagacttccccctggatcttttccctagctattttcattagacctcaatacctacaaatcagaccgaagttctgccctccgggatattatgaagatacatatttggcttcataaagaagctctgctctgcttctatggatttaaccaactgtggatctctctacgtatagatctgtatatatggatggttgtctgtattgaacatgcgcagacttttttcctgtcattcttccctaaacaatacagtataacaactatttgcatagcatttacattatgttaggtattataagtaatctagggttgatttaaagtatacaggaggatgtgcacatgttatatgcaaatactacaccattttagaaaagagacttgagcatctgaagatgttgttattccagaggggtcctgaaaccaatacccccatggatactggggggtgactgtacttaaaacaatagtgtgtggtggaaagtgctaaacttcctaaaagttgtccaaatggtgagctgtgtgggtttagaagaggggagagaaggcttctagctagggaaggaggggtggagagggtagcaattgcaaaaatctttgtaaaaacagtgacatttgtgacacagaagagcagttgggtgtgtagctcttggggggcggaaatagttttggaggggagacagggtggctgaaaacagagaagagagaggattatttgttgaagtgaagagtttataaaggagagttaaggaaagtaattttggaaagatggattgagactaaattatggaaggtcttggtttcacggccagttgagttgtgttttatctgcagaagaaagctatcaaatatttttgagtcagtattcacaaaatcaggacaaaatgtaggtgaaagccagagtttaactctgaaaattacttgtgtcttattggaaatttggagggagattgaaaaaaatacatcaattggtctttccaaaaaaaaaaaaaaattacagaagaaaagctaatcattttcacactgttcaagctcaatgagatctagttgagattacagattaatacaaagctcttgcttacattttgaagttagtatttattagcacatatcttgcaagagtatatcatcaactgcctttcccaaattgaaaaatttcctcaaatatatgggctccttttttcatgatcactatccttccaggagaaaaataaaattaaatttaaattctccctaatgagggaagtaaaacactaaggaataagttttatccagtaggattgagctttggaggtccacaagtcattataattgtaagactttttctatccctgaatactaattttcatccccctgggtgcaatattgctcccattgggactgcatggtgtaggcccaagcttgctttgccatgacattttgacgaacaccgtggaagctctctgatgtctggtgaagtctgcgtcacagaagggaggacggatacaatctcctagccaaataggttgacaattgataggctatgtgaaagatttgattcaaaaatcaaacagagaacctagagaactactggggaagacaatattgctagagcaccatgatcagttacatgttggttattatacgtcccttaggctaccagtgtttcctgtaaaataatctgcctttattttttgctacgcattctgctaggtgatatcggtagaaaagttaaaaaaaaaaatgctagaggtggatctcacaaaacatagcagtgtgagggtgagcatcaacatagtatgcctctgaagtcttgaatttactcttgctatccaaattacctcactcaaacggggaaatgttccttccattaagtaatagctgtgaaaatatttatcttcaccaattcaatggatattctttggagaaatctctgtataatttaataaattagagtggttgagcatataatgttgtgttttgttgttgctgccgttttactgactatggctattgtgtgaatttctgtttaatcaatcaaaattatccattttgtctttaaaaagaaaagaaaaatttgaaaaataagagtagtctacacggtgttgaattccccactgtacccaaagatcgatggctcatccttctgaagaagggaattttgagccaatataataataattggtgaactgctattatctttcaatgatcttccatttagaggaaaaaacttactgcttttacaagctctggaaaactaccccaggagggttatcttggttcactgagcttgggctatggatttaggtaccaagcagtttgacaatcttatacaatttttctttggtcaagtcactccaagactcctatcagccaaaactataatttgatggttcatcatttttaacctattactacctgcttttgcggagagaggggtaggatttcaatcccaaaacatactttaaactgtcattacaacatatacacatggaagtggggacagtcaggtatttgatccagactggattatgtgtgacttcacacatacttttagaagttacttctacaaagatatttggagcttggaaacacactggaatgacttggctgtaaacctgaatggagaatgtcgctggagaggccaaaaagctgtctccatctttcttccaacatccttctagtgtgacctattgctatgtaaggaaggtaactgttattccatctacttcatagttttcatcatggattcatgaggcaatgtgtaaaatgtccaatgtctttagagtaaacagcattttttttttttttgagacggagtctctctctgtcgcccaggctggattgcggtggcagtgatcttggctcactgcaagccccgcctcccaggttcaccattctcctgcttcagccattctcctgcctcagcctccagggcagctgggactacagtcacgtgccaccatgcccggctaattttttgtagtttttagtagagacggggtttcaccgtgttagccaggatggtctcgatctcctgacctcatgatccgcccgcctcggcctcccagagtgctgggattacaggcatgagccaccgcgccccgcccataaacagtattttttgaccaatgagaaatctgtaaaaaattctgccatgatgacttactttctattgataagtatgagggtgctcattctacgttagttttctacagaactcaaaaataagtggtccttgtggaataaatgaatggaaatgttgttttacaaataaaaaataaactttcctttcatttttactgtcctcaggaatgtgacaaaaagcataattttgatgtgttattatttgtagtttcccagaaggaaaaatatactgtcaaagttagggatctatttttaccagtataacaagatgtcactgggagaccattactttattggaaagtttttgtttttttaaaacttgtctactgcagcttcacatatttcatagttgtgtgtttcctggttaaaaagcacgaaacttttcaacatttgctgctcattttgtgagccagatcaaggcaaggaaattccaatatttatgaacaactgtagagggtaattgaaggatagtctgctgtttctgccagttctactgataaactgtgggctgttgtattgtttaaacctctgtctgctggaaggcttctttttctgatactgaagcatgttttcctaagccacctggatgcaaagaggagattttcaggtgaccttggggtctctcccttgccagacttctcagacaaaacacacacacagatacacacacacacacacacacacacacacacacacacacacacagcatctttgtccatcctgggccaggtaggttcttatgagacagaccattatcccttgagtttgagagagtaaagatctctcgtaatttccatctcgcctgcaactctgagccctgaaggctccagtcaagcacagctgactgggaactgtcaagtctggaggatgctgcatatattcccatgcctgggttctggaatagcatctgtgacccacagcccccggaataagagaaagagtctttttggatttgattttgttcatagatatatgctccaagatatgcctcaagcgttatatgctatacatcctcataagtctttcttataagtcatagtctttataaccaatgctttttttttttgtttgcataggttggcaactcaaaggtcagtaccaaggattctctataactgccattgaacaatattacaatatttattaaaaaaatctttccataggtattttatcaggtgctctacaagagaactacataggcacatatgtggtttggagggacttacagtctcattcaggaagaccttgacaaacaaatgctaacataaaaaccaccagactgctatttagccattctgtctgggatgactatattaattattttatgacagcgtttctttccttctgaatggttgttaccagcgaggtaccttttgctcaatgtttgcttaaagacatgtctatatattatctggcaagtctatttcacgtctgttttaaagtcatgtcggttttaagtgcattagatagcactctgatgatgttcacagtagtataaaaacatcagctttgaaatgttgggctccattttcattaacaagtttttttctccccttggtcccaaagcaacctaacagagaacagagggtaggaccaagagtgaggagtgctgggtctgccaggtggagggtgctgggttcgtctcagtgggctccagagccaggtcgcctgccccagaacacagctctgcccctgctagcgcatggccgaaagcgagctacttgctgtaaaatgggattaaacaacacgaatcctgcaggttggtggaaggattaaatgagtcaatatacataaagcgcttatgtataagtacctggcttgacagcaaaggctatataaagatctgctattattactttggtcttggctttgtcactgaagagcaggctgtggagccccactgagtctcagtctcttcatataaacagtggacgaagttctctggaaccattagccttgtcgttttctttctaaataaggcatcttgcaagtacccagggaaaaatcacaccaaggaagagaccacacaatttattcaccaacgcaggccagtgggcataagccaggccagtatgggtcaccccacatttatcaggtcctacgtagcctggggatggggtattctgcctgtgaagataggaggagctgggtcttgtttcaaattatgagggtggtatttaaatagcacccatgtttggcttcacacttttcccgaaatctctctttattcccgtctcataggcagaatcaggaccaacatcactgaacaaagagacacgaattaaaaatcagttgtttggattttcatttctgctgagtgttctcttttaaaatgacctctgctatcccgagggaaacagttttccccattactgacggaaagtgaagtctcctcagaaggaggatttcccttccagaaattcaaaaccagaaaaactatcaagacactgtgattgtgtgccagtgaacagccgtttccaaagatttgaatggaataatttgtttttcatggtttgtaggtagcagataaaacttacatggaaaaatggacaagaagaaatggaaaataagacacagaacctggaatcatcagcttaaaaagcaatttgctttatttcagctgtgcccagaaatagcttgaggttaccaagtgagtatttctactggaagcatcagctacaattaggtcaccaacttagagaagacgtaggcggaaatttaaacaccaagtctatcattataaaggtactttatcagcaaaactgtcagctatggatggttgacttaaaattattaagaggctaaaatatcaaaggagaagacaagtctgtggaagggtccctcctaagatcaacaacagctgagggtctaaacatgaggaagcggctttaatagcattgcttgtggagttcgttttgaagtccttaacttccacgccaatctgatgtgagaaaaatagatgcttccctttggagtccttgttccaaccatggaaacctgggacacacacttaattctgctggtgacagaatgacaaatctgttattgtttaggataagtgaggcatggcaatactcttctgaatttcggtgaaaattagatgtgaaaatctgtaatggtactattcaagcttccccttaaacaagaaacattgagcaaataaaaatatggagtccctggacctattctagaagcctggtgccaaggaatagattttgcatggatcagcttaagctcacccaggaatggatttaactttctcctggaaaatttatttgaaagtccaaaaaaaagagtattcattatttatggatttagtaatgactagattttacaaatatttggatccacatgagccatggaattcagaataatattatttcctgccatattggtaactgatttttcaaagaagattttacttgatagttaatttaatccattttgcttgattattcaaatgttccaaaacacccagtggtggcctatttttttttgtctcttttcactataataatatggcttgatgtttcacaatggctgtatctgtttccttagctacaaaatggttctgagaccggtctttctgtatctgtaggtcattgccatcagtgcagcaaggagcccccctcaacaaatctctcttctttatatggggctgatgcttggccaaaagcctgcaagggtgagtctcagaacagctgctaaaaatgcagctggatagtgagacagaagtgctcaatgccagttcgctgggcacattcgttagtacatgccaatgctggaggagccgtacagacagaaggcacttcatttcatccgcaggtcactaaatgcctttgtccatttcctgcctttcctttatcacatggatattagcgcttatctactcaagtcattataactataaatcgctaccatctttcttaccaaggatttagtcttttgtgccacatacaaggtgtagagaattcttctagggatagacttctaagtccaagctacccagggaactaccatttacatcattcattaagtaaaataaagattgttgttgatgaaggggtagctcttactagggtcccagggttagtccaaggctcaattatgaagtcaaaaggggtgtgtgtgtgtgtgtgtgtgacggaaagaaagagaaagaaagggaaggaggagagagtttggattgggaaagttaccatccactctcctcttagcatacctagttgtcaattttctgtttatgttttatatagcctcattaatgattgcgatactattactatgtttactttttttatttttattttttgagatggagtctcactctgtcacccaggctggagtgtagtggcgcgatcttggcttattgcaatctccgccacccgggttcaagtgattctcctgccttagcctcctgagtagctgggattacaggcgcgtgccacaacacccagctaatttttgtatttttagtagagacggggtttcaccatgttggtcaggctggtcttgacctcctgaccttgggatccgcctgccttggcctcccaaagtgctgggattacaggtgtgaaccactgcatgtggcctatctttacttttgaaataggaaatgaactcagaagttaaaccatctttcaaggtcttataaccgttaggtggtagaaccaagatttgaagcctagttggtctgttgccaaagtccactatattaagctgtttcccaagtgaatctttaggaacattccaggcacctagttcttcatcctttttggttctttctctcatccatgatgtctggtaggttacaaagagagaaggcattaaatgtgttgttaaccagcaagcgcatgaggtagaaattttggaggattaaggctttattgaacccaccaaatcatactccaggcatctgtcttgtttttcactgtagcttctaggaaggttaagcattagaaactcgaatggtgatgtgaatcataggaagcgctaagctaaactactgaatgagtcattctttccagagacaatggcccttatttctctcaaactcttaacagacttacaaatgagggtagaagaaaagctacttaaatttactacccctactaataacaccaaaataaatttattactctactacagagctttcactttttcataagttgttatcaacattttgatttttgggttatcagaacatctaacagcatgttctaaatgtcaaataaaaggtaattacatgaaatgataatgatatacaatctctttactgtcttatctaagacaatctcttttgtgtgctgggagtacaacaaacttgattcttggctacctggggcaggggtttagattactaagaatcctagaactacacacagtctgccataaaacttatctgtggaggagaccattgcaatagctataactctttggtgtgttgtggggggaaaatggtttgagactcactatttcagaggaagtggtggcaaaaggaagaggagaatgaagttggtagcttgcagaaatagcagagtggagtagctaaaacttagctagtggtttggtgtgggggtggagcagggtcatcaccattaactctgaagtttagccctgctgactcaggggccaatggtgctgctgccagaaataggggagctggaaaatctgagaagatgattaattcagctggggacatatttgcctcaaggttcctcagaggggcatccccagtggatgtgttcagaagtcaattgaaaataaggccagcacccagaaatgggctgagctggagggttagagttgccagtcatgggtctatggtgttcaagacaagagtggccagattcacaaagggaacaaggtggaccagagagagaagagagcctgggacagggtctaggatgtatttggagtaagagagaaggaagagtagctagagaaaaaaatgtggaaaaagcagtgataataagataacagaagaaatcatcacagtgtgaaaaagcaaggccaaggatggataatttgttcttggaggatgaagtggcctagactataagccccagagtagcaaatcagttagcaaagtggccaatctcagtatgtcattgtgcaccagaaggtcccatatgagggcagaaaaaaaactatagaactatacacagtcttccatataacttatctgtgggggaggccactgcaatagctacggctctttggtgcgctgtggaggaaaaatggtttgagattcactatttcagaggaagtggtggcaaaaggaagaagagaaagaagttggtggcttgcagaaatagcagaatcaaaaagaagagtattttaagacaagagaaatgcccagccagtggagagagaccaggagtggagaggagagaagtgcaggaaggaaaagaagggaatgaagggttgatggaacagttctagaggaagctggagggcttgagtgcagaagcacagttatgtggcacatgtctgcaaagtagttgggcaaatacaatgtccatcagagagaggtcacatgaagatgcagatagaccccgtcatgtgaaggaaggaagtgatcaggtactttccatagaactcatttctcttctcaggaatacaggggtgacaggatcttcccagaggacaggctgcatggtatgggggtcagggctggcagcccaggccaggtttggaatagccccaaaatatatagcatggtaggaggttgtgcatggatatattgagtattcagtgcacaggttaggatgaaaaaattgtgtcaaagtagttatgtgattccaataatacttagaagacttagaacaagagcagagaaagtaagtggtcatcctgagttaataaatgaaggtaaagaacttagcactccattgaaaggtacagtaatttaatattgatattagattgatgggtccttcatttccctatggtctcatcatagtttcttgcaatagggatgacagagcagggagtaataggctgccagcaggacctcaatggagtgacccagtcttgggttcaggcccatcggggcagaactaggtttgtcaaagggtgcttgctgactggcttggagagcagaggtagccagaggtgtctggggtcaccatgaagacggcaagtacaatctgtaggagtggaataggcagggaaggagtagaagctgtggatggaagaacattccagaatgtgagatcttggagatgacacgattttttctctgaaagctctcagcccatggtgagcattaaaacactctcagggcaaccacacaccaatccctatactgacccctactccaaatgtttagggtggagccctttggggataccatatgggggtttctttaatattcctcagtggacttggcttcctttctcacagacagacagggactgttatgaatggggtacacacctattttattcactcatattttattatcctatattatattattatagtcatttcactgccaccaacatttccttctccaacgatgtggtatgcggtgtaacaaatggttttagagaaagtgtctggtggtctatcaacaactctgaccagactttttttttttttttttttttttgagacagggtctcactctgtcacccaggctggagtacaatagcacgatcatggtcgctgcagcctcaacctcctaggctcaagagatactccttgtctcagcctccaaagtagctggtactacaggcatgcaccactacactgggctaatttttgtattttttgtagagatgggttttgccatgttgcccaggctgatctcgaactcctgggctcaagggatcccgcctcagcctcccaaaatgctgggatttcaggtatgaaccattgcacccagcccagactgttttggctgatcatttatgtccctagatactgtccactgtttcaccttccagtctgccttgcattaactttcaatgctctttccatcaaatcacactgggtcctatgtcaaaggctggcactgtttgtttcctcaaacctgaaagttgaaaggtcaagattcaacatcatgcaccaagagtttagtctgtggaggaggtctcaaaattgaggatggaataactaactccacaagatgggggcagggagcaggagatatgtggcatttagcaaaaaagccatggttccctatgtgtctcccaaatatccacatctacctagaacctcaggttgtcacgctttttggaaataaggtttgtgtaaatgtgatttgttaagatgaggtcatactagattaggttggctgctaaattcaatgatcagcatccttataagaagaggagaagacacacaggggtacacagagagatgccatgcgaagacagaggcagaaactggagtaatgcaaagatgactcaagggatgtcaagggttgctgggagtcaccagatgctgggggaagcaaggaaggatcctctcctggagccttcagagggagcacagaaatgccagcgccttgatcttggaattctagcctctagggctgtaagagaatacatttctgttgttttaaaccacacagtttgtggcaatttgttatggcagccacaggaaactaacacagtcccctaacctcaaccactgagcttcactgactagctgggaagtttctcccaggaggccatgttgtccctgaagccagtcccaatgggaccgacatgattgacaggccagggaagcctcaccccacaaggctgcatgcccaggtaagtgtgtttcttgcaccgcccttgccatgacaatggcttgttctgacttacggctttgttactttgaacttcaatcaatggctgaaagaggaacgttgttttgactaggctcggggtttctaaactccccactgtgtggtttccaggtcagacagtcaggctttgttctgtgaatcattgctgaaagattcaattaaatctcgcttcgtccgccttgtggccagggtttcagtgacttagcaagaacaggagcatgtagccagttgctgaggaaagccagacatttgaggggagcgggctgctgacacgaggcagggagcacagagatcttcggggctccagacagcggtgaagaatgaagtccccaggcgcccagcttcttggctgagaaggcagctgttgattcctgacatactaatttaggacccgaaagagaaagtgagggggctttgtaaaatcacttaaaggaggctgaatgtcaagggggagatgagccatgtgttagcaccactgtccttttcacgcaggcatgagaaagaatcacaaatgtgagtctggttgagatctttatggttaggaggcctcctttgaagtctgacatcgctaaaaaaattctcataaaaccaaagagggggaaaaaaagagcattttatcctagctaggagagcaccaaagtatgtggaaaggagaaaaggctacagccctctgcagaaacaggaattcggcagaaccccaagtcactcagaaaagagaaaatgaaagacaagatttcttgaagtgcctggaaaatgctagcttcgtgtgcagacttgctctagaggggacagtcttgtgtgatgccagagatccaggctgatgaacaactcccatccccagggcacaggtggcctgaaatcacggagattcttagaacctcagtttggtttcttatttatagaatgagacaattcatgccacctctcttttctcttgcaggattttgtggggctcagaggagttgctgtttgtgaattcactctgtaaatttctagcatcctataattgtagacaagtcagtatgcgcccctcctcaaggctgggcttaggatcccaagacatccctattgcctgcaccacatcgggtgccagctaaggtagaggaggggtgccaaggaagatcagagaagcccagctcctggtgcccctggggtcagtacggtccttcttcccttgtatctgcaaaggacttgtggacacagccgggggaaacatggttgctaagagactggcattgctgcactttcgaggacaccaggcgtgtagtctcatctttcatcaacattcctggggctgctcctttcatacatgagcccagaaggaccagggcggtgcagatcccagggaaggggatggcagggctcagctgcccagcctgctgtcctgctgtggctctgtgctgcagcatcatctagtactttcaaaaactgtgctgtgggcactcgcctcggctcctgtacaactgtccttcccatctccatctgccaaactcattcttacccctaggacctgctgagatgctgcctctaccatgaagccatccctgagaacagtagcttgttatttctactgctgcttccagctttgattggctcttccctactcatcccctcacctgacatccggacagtgtgtgcaacaacttattatgattattattgggatggtctcctccggcacccataatcctgtcctgagtgagcaccctgcacatgaggttgtttgagaacactggctgaacctgtcaacagttggtggattctgatccagtagctgatagtgggcaggagaataggggtgtggctttccaggctctgaggcccccacatcctcaaagggaactgagatgatcccaataggtgcaggttcaggcaaagtggagagatccagaacatgtgcctttggctggcccagatctctctctctctctctctctttttttttttttagatggagtttcactctgttgcccaggctggagtgcaatggcatgatctcagctcactgcaaccttcaccttccacgttcaagcgattctcctgcctcaatctcctgagtagctgagattacaggcgcccgccgccacacccagctaatttttgtatttttagtagagacggggtttctccatattggccaggctggtcttgaactcctggcctcaggtgatctgactgtctctgcctcccaaagtgctgggattacaagtgtgagccacggcgcccggccccagatctctttatactgatctttgccattctctactctgcttggggtagcttcttagttcgtactacagcttaaatgactgatagttttacctttctaggagagctgacttctcagaggttacctaagcttgaagtcaaaggcatgaggctgtgctaggaggtgtgggggaggaagttacttttggaagccagggtctttcccaggcttctgaaatcatccccttgggcaactgcctggcatgatgtgtccctgattaaagcagtttctctcctcctagtctacttgggaagctctgaggatgattctttctcttttgatacatcaaatccacccaaagcagcttctgaaaaaactatgaaaaactggccacaggagtgtttgttctggtagaatttaaatgtctttgtgctgcaaaagctgaaatgtctagtaagatttctgaccaaagcctttcagctcactataagcattggcacgaagggtaaaccacagggatccagctcttacaatgcttcattcccttctgcaggccctagagactccctgggctttgcctgccacatctgtacactggggagaaggtggattacctcttacgctccaagtagcaagtcatttaacctcactcctcatgggttggggacgggagcatgctcacagggtggaaggaggatgaaacggatgcacagtaaatgtgagctgttttcacaattacaagtctcacctcccactctgagcttctatgactctatcgttcatttttctgcacagggactgactcaaggctctaaggttctatctctgtgctgctgcactgagctgctccctcctgaatgtctctgcctgtcagtttcattcagagacccctgaccaccagtaatcatcagatatttcatgcagctgggtgaggcatcagatccgacaaaataggaagattctttttaaaaccagaatctctaaaatgagtttgtttgtgatgcaagtagggtctggatcctacaaaccacggaagacttgcagacaaggcagtttcttctggaagcttccccagggaagagcaggaacccccagaatggcagagctgcacgtgtgccgctgtgtgacattcctggtgctaaaaagaaacagtgatggatctttgccatagtggggaaaaatgagccagtgcaataggcctagtcataaaaggtggatcagagggagggttttagttgaaagcttttgagaggttgagcttcattatcctgctgctgttatatgatgaaccacagagacgtgcacccataccactggggctcttccattaacggatataatgttgggatatgaggaataattttttttttttgagacggagtttcactctgcctcctgggttcaagtgattctcctgcctcagcctcccgagtagctgggattacaggcacccaccaccacgcctggctaatttttgtatttttagtagagacagggtttaccatgttggccaggctggtcttgaactcctggcctcaggtgatccacccgcctcggccttccaaagtgctgggattataggagtgagccaccgtgcccggctggggaataaatttttgctatacattttgcataaaagcagacaaatgctcagtaactttttcatagaaacatctgtaactctgttcatgaggagaatgccacaggtcactcacttatttgcacaaagagccgtacagttcaagggaacgctgtgtcattctgtccaaccagggggttagagaatcactgatcactaaagccaggagcaatgctggaagcctgtctccactgctgcgctggcgaagaccggggcccagcctctgtggttccaccttgcctgcctctcttgctatatcccagctgcttcaggttttctgaacatgccaggcccctacctgcccctagatccctggacatgcctttacctcctcccgaaattccctcggtcctctcttcccttggctagataccccttgttaaagagaatattcacatctgccatggctccctcagcctgggtaggcgccctgccctgtgcattctggttggccctatgagtctgttcccttctgtgtcacccccagtggggcccttgatgacatggctgtccatgcagtttacctctacatagcagctacgggcacttggctgactttatctgaccaaactgcatagctatcactatgtgcccggcagcattcctagcagggattacgatgatgatgatgatgatgatgatgatgatggtgatgatgactgttatttctgttttacaggtggaaaagcagaggcacaaagcggtgatgtgacttgcctgaagtcacacggctacaaagtggtagataggggaacggctcccacgtctgtatggtctgaactgggttgtgtagtgttccccaaagttcatgtccacatagaacctcagaatgtgaccttatttggatatagcgtttttgaagaagtaactggttaagacgaggtcatcctggattagggtgggctctgaatctaatgactgatgtccttataagaagaaaaaacggacagacagagggaagacctcatatgatgctggaggcagagactgggctgatgtagcccagaagctaaggagtgctggcaactgctgtaaggtagaaagaggcaaggaaggatttccccctagagcctgcacagggagcaagggcctgccaacaccttgattttggacttctggcgtccaaagctgtgaaaataatttctgttgttttcagccacccagtttgtagtaatgtgttatggcaagcatgggaaagtaacgcaccccctctcaggagagtgaagcgggcggtgtctccaggggcctggacatttctgccccttcccaggacagggtacagagccagcaggcctgcttccctggaagttctgcccggtggtggatgtagtgggggactcccagatggcgcacacattgcacaggcaggccagcatgttcctctcccaagatggcattttgggaggtacacagtgctggagcacgagccaggagcctggggcacattcccggcagccagactttggaaagcaggaggcagccacctggggcttcaatctccctttttagaaaatgaatccctgaagtgaacatgagtcaggtactgttctgggcactgaggatggattaggcagtgagattggtcccagtctctgtctccatggaattaacatcctaggggtgaccagccatgaatctcccaatcattaaacaagtggtgatttcagagagtgataagaggtataaagaaaaactcccctctcaaaagattatgacgtttctttcacaagattaaacattacaaatataaaaaaaaaaaaaagaaaaaaaaaaacaacccaagaaatgggatggcgatgccctttggccatgttcactgctgcatatccacacaaacgccttcgtggcagcccaggcagtgcccagcaagctcagactcagccagtcctcgagctggcctggcagggctttgcaatgcagctaccttgtggccagaggggcccatccaagtccagtttctccatgtcagggctagcaatgaggaggatgactgtgcaggcagcccgcccaggcctcagcagggaggggagcggagactccctccgggtggttctctaggcagagctgccagcagggtggacggttccctgaaaggaccactctcttgccctgccaggaagggcatctggggcctttgggaagcactcgtggaaggtgctgggtgcttcacctcgtatctggcggacgccatcacctctgctctacttctagggtgactgctttgaggaagacgtggcaatttcagaagctttttaaacttcccagagcagaaggccaagtttcccaatctaatctatatgccttagcgatgtcactcctggacagggataattttaaatgcaagcatactgatgtagctataggatggggtaaggtaagatgtagggtagaaaccattatcttaaaaaaagagcaacttcagagaaaaaagcagttctaggggcaaacaaaactgtaccagaggggctcctaggaacctcagggactttccatttgatttgccttttcaggtaaaacaccattaataggagccagaatagagtcagaggacaatgtctgtttgtttgtccctacacacacacacacacacacacacacacatacatacaggcacacacagacacacacacaggcacagacacacacaggcacacacacagacacacacacacaggcacacacaggcacacacacagacacacacacagacacacacaggcacacacacacagacacacagagacacacacacagacacacacacaggcgcacacacacacagacacacacaggcacacacacacagacacacagagacacacacacagacacacacaggcgcacacacacagacacacacacacagacacacacacagacacacacacacacatacacagacacacacacagacacacacacacacgggtatgtgactgaggaatgtgacatgaatgacctggcataaatgcaatgttctaatttattccacatcattcactgagattctccactcactaattttcctaaaagcagattttttcatatcctttgaagtcaagcaagtggttttggggaaagggttgttccctccgggccggctggcaacatacggaattgtctcaaaagccccgttagcaacagaggaaaggtcagccccctcttagtgaatggagaaggagaaagtaaaggttgtgatgataaacatagagcaagttttgacaaccattggatcatttaacagtaccagaacatctagacggaaccacatttttttttaccattgctattcatatattttttaagaaaattaaaaaaaaaacttccaagacattttctaaactgggaaggaggataaaatatttacccatggtgtaaactatgtaaaatgcaataatgtgtaagacctggtatttgacagcataacagggtgaccatagtcaataataatttaattgtacattttaaaataactaaaagtataattggattgtttataacacaaagaataaatgctgagaggatggataccccattttccatgacgtgattattgtatattgcatgcctatatcaaaacatctcatgtaccccatacatgagatgtgtataggtacaatgtgtgcataggagtgcagtggtgtgatcacagctccacagctgtgcacctgctatgcgtatacacctactatgcacctaaatgcctaggtacctacatttacgggtactacgtacccgtaaaaattgaaaattaaaaagaaaaataaataaacgaaatgatctattatcttcttctactgatgaggacataatgaagggtttggtatgttagactcatacacatatatgcagacttttgtggttgtagttaaattggtcaatagatatagactgacctaagaaaagaggaattaacttccagcctaatactgactgggcacttctgttcccgtacaccctcagagacttcagccaacttctgaagcagttaattggctttcctggctggaaccgcaacgccattgcaggcaagtgtcttggagctccagacaggcccgtgaacagggtggcaagaagtctaggagaacatgaatcagccccgcatggacacccgtggcatttaagcccgaaaggaaacttgactggtagccgaagtcagcaatggatgccaagcaggctgtgccatgttgggggactgaggggtggggaccggctcctgagcatggctggtggccacggaggccccaccttgtgaggccactatgtcccctttggccctacacatcagactccacccttcccagcagactctctgaccctttcagctctgaccacaaagggtggaacttaatgagctgggaacccaatttctcactggttttggtaaattaaaagcgataaaatgagtaatccattaaagtcatcatttttcctaactgaaaaaaaaaagtatgacaactctgttgagacttgacctctttgaaataaaggctgttactttctgggagctttttttttttttttttttttttgagacaaggtcttgctctgtcacccaggctggagtgcagtggtgtgatcacagctcactgcagccttgacttcctgggcataggtgaccctcctgcctcagcctctcaagtagctgtgactacaggtgtgcgctaccatgctcagctaatttttgtattttttgtagagacagggtttcgccatgttgcccaagctgttctcgaactcctgaactcaagccattcacccgccttggcctcccaaagtgctgggattataggcgtgaaccaccatgcctggcatctggcaggtattctgagatttaaatctttagatactgcagtttactcattgtcctttgttgtcatggagtttatagaaaaggctatttaggaactaatgctgtcttaattattttctctgtctctcctctgcctcttcgaatgtacatgtgtaggtgtatgtgtgtgtatatgtacgtgtttctttttatacttggctttttgtagccatcattttttatcttttagaatgcccccaccacacattcagcatagatttgcttttcagaattttgaacattgagaattctttgaatattttctaatacctgaacatttacctttatatgtctgcagcctgtggacaggtgtgtagaatagcagactgtcagacttgggaggaccatgaggctattgacttggaccttccatctcatcaagcaggaattctcccaaggaaccaccgccctgacctatcccaggggtcaggcctgcctaaaccaggcttgagttttgtatatattgctcagctcagttgtagagctcaggtgtgataactctgcctaagaggggatgaggaggagggctaaatggagggaaaagtggtacaggagagaaaatagagagaaagggacattataagggtgggactggggtcagaggctgggaactgggggctgggggagatctatcagaagagagcaggctgcagggacgtcctcctgggttcctgctgtgtcatgcgtctgaccttttgtgtctctttctcaaaccctgttgatgtgtcagcccacgagatgctgggggtgtggagaggacgaagaccagggcagaatctttggcctaaaaagcagagttcctggaacagtgtcgacattttaaaaatattagctagcttgaagaggaatgctgaactctctctctctctattgttctctcctacttaatttcataactgatctcctcttattgaaactgtaagtggaaaaaaagatggtttcacagagatcctcattaaagaaagtgttgccgtaagtaatctagtaatgtaggcgttctgcagcacaacattcctcctgagcttatcactttacactgtgaggccaagatgttaaaaaaaaatacacacatacacagcaaacccctactcccaaacataagagtttagatcttgagcaataagacatagatactatcacaatattttgcaaatctcagaaacattgccacattttccatagggttaacatctgagatgaaaaactaattcagaacttatgattccttttaaaaaaattcccttagccaaactgaagaaatttactcgggagaagaaaatgacttaacttgtagtttccacaatgagaaacatattctcatggctttcagccactttctatcattatgtgatgggcttaaattgcattcactgacagtgaattaaaagcatgaatgaaatctttaaatgaacaactgaaataaaatcatgatttaaacatcctagcacttaaaagtaaaagaaacttttgcatggctgtagacataatgatcaatactgagtcttaatcccaaacctgacagcccatatttttcaaactgagtgcctcaaattcacaataaaaaaaaataggcctcttattgctgcagtgagatagggcagtgtaatgcctatgagtgtgtctcttcctgtgttgtatctggccttgagtccacagaatcccccaacatcaaaggaagcagtaggagatggtgtgtggaacaccagatagccggaggaaaggggaaactcttcctttgccaagagggattgctaaaattagatggtaaagtagtcttggcactggaagtcgtcttgctgacgatcagcttcaatagatgatagaactgttgcttatttggagactttcaaagagaggggcttacaccccaggcaggaacgtcttaccaggctgaagagctctttctgtgtggagatgctttcctaggtctatcttaaattcttcatgctgatattcaaccccacttcctcttgctttggagcttagtgcagaaggggccttgccaggcactattcttttcctgcaaacttcccaagatgattttcataactcaagaccatcatccttctctccccaacacccccaatctgggcgcttcattttggccttttctgtgcatttggggtgcatgtggaaagaaggttctgcaagatggggtggaaggaccaggactgggctctcacttgggctgagcgtatggtcacctggcacatccagggccatctctactctcctcccccatctcccttgcctctgccttgccctggtgacattatctagacatctaccactcaaatgtatgacttgggtaagcattgcatcttctatgtttctcttttaaactttgagaccatcaggaaagggttgagcctgtcaatattaatatctttgctgccctcgtttcctctcaagaaaatatttagggaagcaagaagggctgggagaggggatgaagaggaaaagcagggggcttaggaaaaggggacctgagcaggggccacagagatcagccccattttcctgagaacgtccctgtggcttcctcagagggaccacacaacgtccagagaccaccgtgtgactttcagagataacagcgacagttcctggcaacatttgctccctcccccacctccatccttcatcctcctcctcagagaattttatttggctttgggcaacatgaaagtcaactccacagagtgcagagggagtcagagagcccagtcctcatctcatctggtcagcttcttttttctttttttctttttccttttttttgagatggagtcttgctctgtcacccaggctgtagtgtagtggcccagtctcggctcactgcaagctccgcctcccaggttcacgccattctcctgcctcagcctcccgagtagctgggactacaggcacccgccaccatgcctggctaattttttgtatttttagtagagatggggtttcaccgagttagccaggatggtctcagtctcctgacctcgtgatccgcccgccttgccctcccaaagtgctgggattacaggcgtgagccaccgtgcccggcctcttttttcttaagaccaaaacaaaccacaaacgctctcaccctactaaatatccacccatgaagtacagttgggaaatctgtgctccaaagcaaaaccattctctttgaaggagccagcctagactgctctatcccaccaatgagagagttaatagacttgatgggagacaggcacatggcaataaggaggtctgttcttaggtgaaataggtgagttgtgctggccatcagcactggaagccctgaattcaggcctttgggtgagcagggcagcacacacaactgggcagagtggccctttatctcatgccagctggacccagagccggagcttggaggctggggtgatcaggctgttcttggcagaggttcctgaaatgaaatgactctggtggtgatgggaggccgtggctccaggcctgccccagcataacacgttgttagcatatgttaacaggctgccttttctccaaagatcacaaaatgcattccatttagtgtctgttttggaagtgttgctatctgtgttttataggtgacaaaaccaagatacatcaaggtcatggagcccccacagctgagggtgagtgagttaggggctgacctgggagacctgcgcttcctgattctcaggctgttgctcaacagctgacccctgatctttccaaactccttccagaatggtccttttggcctgcagatctcagggtctggtaggagttaaaaggaacacgtgtgttctgaactccctggaagagagtattgaaaacacacacacaatctagtgttcgacatgtggggaccgagatgaaaggggacagctgtttcagtgctgggttttgtgaccacacgtggttaggccttcagcccacggaaagcacatggaaaatgagtggaagacctggctccctctcttctctcccgttaggcacaagacggtgtaaatcctggtcttcctccttttaaaagtgtgactattgcgtcagactaagctttctaaggaactcgccactggtatcattcaacagaaaggaacctgctagattaaagctaagtgaaattttccaaatgatttcagctggctctacctagtggttaagcttcatctttatcgggctgaacgagatgagctttcacccaagatgttggagccacgcttataatatttgacttttacacaaacagttatttgattgcaatccaaacaaaagcaaatgatgtccaaagttagaactatggatacaaggcactgaaacatcttaaaactcaaggctgaaaggtatctaaggaatttttgtctcaaggaagaggtgttataattcccaaaaaggaaactgtgtctactgatttttttaaatctagagggaagacgatcatataattttctttctttcttttttttttttttttttttttgagacagagtcttgctctgtcacccaggctggaatgcagtggcgcaatctcggctcactgcaaactccgcctcccgggttcacgccattctcctgcctcagcctcctgagtagctgggactacaggcacccaccaccacacctgactaattttttgtatttttagtaaacacggggtttcaccgtgttagccaggatggtctcgatttcctgacctcgtgatctgcccacctcggcctcccaaagtgctgggattacaggcgtgagccaccgcacccagcctcatataattttcatcaggcactaaagcttaacaatcaactggcaaacaaatgtttaccatacacgactgtatgcaaagttccggaagggcaggcagatagctattttattcatgttcccatagttgagtgcttcatgttctttggacttgtataagtaacattaactactcttaatactgggaaattctttgttatctctctcaaccgtctctcacatcattgccttttggtatggcctcctaatctgagttctgttccagggaaaatgggaatggaagtcactctcaatgacagccctgcacacgcagggaacacctggttactagtttgtccctgagccacttcttctggtgccaggctgagctaaggataaggcagcagaaagcaaaaggcaacctcgaatgtctctagatccagacttttggtctttccctccaaatgtcttcctcccatagtcctctatggcaattgcagtttccagatttcttacgctgaagaacatgtgatacttccatgcctgttttcttttgctcgttccctccatctaccagtcatcgactaatgctggttttacctccaaaacagtcactctctttaccgtctctataattttttttacttccatttgcaatagtttcttatttgtattttttaaaagtttttttaatagccttattgagatataattcacatatcatatagttcacctatttcaaatgtacaattcaataagtttttggcctattattttttttgagttatggttttatatatatatatatatatatatatacgcatatataacatacagtttgacattttaagaatttttaactatagttctatggcactaattacattcacaatgttggcaataataattactattcatttttcccaaaactttttaattgcccaaataaagactaaatatgcattaggagtagaagaaaacttcaacacgataaagctcatatatagaaacccacaactaacataataccgaatgataaactactgaaagcttttcccctaagatcaggaacaagacaaggatgttcactcttgccacttctattcaacacagtactggaaattctagccggagcaattaagaaaacaacatataaaagacacccaaattggaaagtaaggagtcaaattatctctttacagatgccatgatattatatgtagaaaactctaaagaatcctgaaataaaaatctgttcgatataataagtgaattctgcaagcttgtagaatatatagaaacacaaagagcagttgtgtttctacatacttgcaatgaccaattcaaaaaggtaactgaaaacaatttcattcaaaataacattgaaaagaacaaaatatgtacaagtaaattttaaacaaggaggcaaaagactcatatactgaaaaccacaaaatattactcaaagaaattaaagaacaaaataaatgaaaaggcacctcatgttcatggattggaagacctgctgttaagataactatactacccaaagcaaactaaagattcagtgtaatcccccatcaaaatcccaatattattattattattattactatttttacagaaataataagacccatcctgaaatgctaactggctttttgcacttgctgtttctccttcctggtgtgctcctgagtcagacattagcatggctcccagtgtcacctccttcaggtgagtatgccacatgacactcatcaccttctcagcgtgcccctccttcaccagctttgcacccccagctgccccttatttgtcttatgcttttccattgcccttagtatcattttcccacacagcacattttatttatttatttatttatttatttatttatttatttatttattatttatttatttatttagagatggtatctcgctctgtcacccaggctggagtgcattggcgtgatcttggctcactgcaacctccacctcccaggctcaagcaatgctcctgcctcagcctcccgagtagctgggactacaggcacacgccaccatgcccagctaatttttgtatttttagtagagacggggtttcaccatattggccaggctggtcttgaactcctaatctcaggtgatccatctgccttgccctcccaaactgctgggattacaggcgtgagccactgtgcccggcctacttatttatttttataatttcccctttaaatacaaatttcacgaggtcaggaagttttatgtttgttcactgctgtatttccagcatctaaaacatgtcaggcacatagcaggcattcaagataaatatttatcaaatgcaagcatgagtgtaaaatgtatgagaaaaaccaatacatccacatttattatttttgtaatgagacaagaccaacaagtgattactaatgggattttcgcctcacattttccttaacagaatttaaaattgtggcaaaacatggtggtgcaagaacaatacaacttcattacacacccaaagaagtggtgagttcatctatttcctcccactcgaaaagcaaattcattttgggctgttttcacatcatcaactctccttccaatgtactgctccttgaatcagaatacatttgaaatcatttcccagtctgaaaaagtcatcagtgtatcttaatccatcttaatctgtaatggcaaaggaccccatgtgagtggagatgcagttatggctaagtgtgggatgccaagaacttgactttggctgggtgagagcaagtctcaatagcaagggagcaagtagacagctggtaggaaaatcatgggttcgcctgcatgtgagtaacaaggacgaacggtaatgggagactcccacaagtgggaaacagtacatgtagacatgactacatgccaaacaaatgtacaattgcacatacttaacttatgatttttactttgatgataatgagtgaacaagaaggagaaaagctgtctttttttttttaaaaaaaaagatgactcaaccatgtcttatattaaatagatattgggaacatttgcctgaattacatcactgacctcatgaagccatgaaatctcccacagaacaccacaaagccacagctttatctccaagctcaacactttgtaatggcacctcttcaaggcttagttcctgtatttccattctcaggggcagatgcttcccttaggaagagaagcccactgtctctctgagaggagaaactgatgcttcttaccctgagactgaaagggctgcagtgcctaaaatgagcactgtgatccaacctggagaaactgtatctttaacacactcacaaagaaaaaaataaaaaagaaaaccatattctttagatttatttcgttcaaatacactctttagctagagcacaggcatttaccttccaattctacttatctattgatccaacatatttacatattttcaaaataatccacacacattctataatcccacccatataagatttctttaaagtggtaaaccttttccaccaccatttactgttgagaaaataaagggatgagaaagcattagctgtgttctagacatggtccagtcaaagaagggagaacttggaaatacagaactgtggttattcatcgtgactctgccagccattgactacttgtgtacacttggaccaagagactggtttgataccagtcacatccatgatggtgacattccatgggatgacaaagtgcctgtggttgtgccagaactttcttgtatcaaataattctagaaaacaagaggcccagaagctagaaccaagacaccacttttgtatgaattaacaagacctcaattgcttggccatagtggctcccatcatggcttctgagttgtagaccttagcattatggcacatctcaagggactatgaaaaatcagctccccatctgtgttccatagaacagcacgacaatttcaggacctagctgagggcgtgtcttgagtaaagtcacagataaagcttacactagaacctgggaactttgatcctgtttttatcaccccgtccattgttgaagtaatcatttaattttcccaaatggtccatggactgtttgaagcaggaccttacctgattctaccccacttctaatgcttctgtacctgaagattttattaaatgacaagggatcatgtatttggggaaacagagacattcaactttcgggctcacaagagaggcagctttaagttcagaccttcccttgttgtctgcttgctggagaagtgtctgtcttgtgatcccagcttacaattggccctggaccacaaaccaggcctacaagaacatggatgtggtgcccatgtttcaaattcatctcactctcttatcagcaggggactttgatttggcttttcctaagacatggttaaaattcttattatcagcttcaatttctgtgccacagttttaagactaaccacctctgcttttctctatccacagcataaaccacaaaaactgctgtcaccactgaattgttgaaagagaaggcataggtagattttattgatgtattcagagatctccagaaatcatgtttttttttttattagagttgaatttcttcttcataccaatatgcttacccaatgtgatggagtgatgaggaaacgggagagatgaagacagagatacagacagagatgagagaggctgcattttactcagtaaagacccccactgaccccacaatttgtctacagtcctataaacaccattaggattctgtatgactcattgtatatgcaaggaaatagcctcttctgtcctctaaagcaccacaattaaattccacacttgagtcaaattggagtcagatcagaccaatggccccaccccataccccacgaataatttaattaataatttagttaatctatactaagaaccttcatattacagcttctctatttttaagcctaggaactatcagttttccagacatactatatgacttaaaagacaggctccacagttccatcctcatccctggcacctaatcataaaggacattcatgatcctagctatcccttagcttccttcttacagctcagactctgctggaccgaccctgatatacctgctcagcactcgccagctagttgccttccctcatgctataaatgctgtacatggaggaagaacatggcttttggctgcagctggaagtctcctcccctccatctcttatcttttaagtaccctttgaatttcatgccagtgtcaggtgagtatggggtggcactattatgtgattttcctgccacatttgcaggtgtgcctcatggccttgacacatttaatgtcactttctttcaactgggatgtgtggcgaccagtacgtccactccagctggaatgcctgggattgtgtttttatggatgacgtcttcacagctgggaagcatctctccagggtctctgacagtgagtaagttgctcacatcattgttggcaggctcatcccaattttaagtcattctctaagacaaggcagacaaaaagtctcatctattaaggtcaccaggcctttgagtgctgaggagctaaactaaagcgttgcatccaggtgctggattgtggagttgttgtatgcattgtctttgagagaaaggctacagtgaaggagatggaggcacccacacgtggaagattggagatttaaacatgaaacagcctcaatgtttttcttgaaaatctgctttgcctccataaaagcctcaaggaggcaaactgaactaaatgtacttttcaggaaacacaatgagaaggacatcatctggttaacacaataaagccacactactctctctccccctctctctctttcaagccttccagagcacccttcctctagcagacatagaagaaaactacccacatggctcagaggttaagggcctgggaacgagcctcaggcagacatggataggagttccattctgctggttgactttgggaaagttaggcaacctctctggatcagaagaggagagcaataataccagtatcctggttgttacataggaagtgctgggcacagcaccgcgcacataaggggtgctcagtacatgctggtcaatattatcgttattaatatttcctttgtctgagtggtgaatgaggagcatggagaagtggtgtcaccacatcttttgatcctggggctcagtggtgctttagagtgggtgaaggctgagcctgaatcaaggcctgcccagagcctttctctaccaggcaaaacgtgctggaaagatagaagagaggagctcctgattcacccaggacagtccccatttactgtacttgccacctccttttccactctgggaagtacccagttaaggaggacaaatgacactgtcaccctctctaggaggtaccttaggtggcttctacagctgcactgcttggtattggtgccaccagccccatgtgggcaagaagcatgtggctgagacagctcgaaagtgtaacctgcacaccagatctcaaagactcgggaaagagaaagagtgtaagctatggcattaataatttttatatagaatgcatattgaaatgtaacatttggctatagtgggttaaaaatattagtaaattaatctcacgtgtttcttttcacttacttgattgtggctacagaacgttcatctgcgggcttgtgttctattctgcggggcagggctgtcctggaggttgagccccatgggcagtggacatgtagctgtgctctggacagacgctgtggctgccaccacattttctctcaggctttgggggaaatgctctcccccagccccaccccagaactgtgccttaatgccctggcccggttgggtctccatccctgcatccctgcagttagccctgctctctaggtgacccgccgtcctttggatgtgctaaagccaccacattcaatatattcagacatgtgccaccacttccccttccctggctccaccctttgtctccctgcagtgtttctcctccaggatagcagcccttttgggtaccagagtccagaccttcatgtcacctcttgctggcctctactccttgctcttcagaagcaagtcatctgccaacccccttggtggcctctctcctacctcttctccactctcactgccaccaccctcgttcaggccctttattttgtgatatttactgtttcaacatcctccaagctgatcagcttacttatcttcctattacccccaaacgccgatgagatccttttataatccagaactatttcatgttccagctttaaaatatgtccctgatcctccctggtacccaagctcttcagcctggcattcacagccctttagaactcagccccattttatggatccaggtttattccctgttatttccattgcctcctcccatctaccccacggccaccacccctgggccatgctatttttcacaaacacatgctgtacctttttagctctcagtgtctgatccatggtgctccttggcaccaatgtcctcttcactccctcatctgctttggggagttccatctaacctgagggctcagttaaaacctgcattctccaaaaactttccctgcccctccccccaacagaattggttcatcttcctacaaccaatggcaatttcatggtggtgccatgtacacattcgagttggcctcatattaggggaatgtatgtgagcatttccattctcatctagaggaggacttctttagtatttggtggttatttcttcacattctgatcctccctcctccatagcaactagcatcaacttccagccaccatttggaaggtgttcaatacgtgagggtgacttgaggcaaagacaagggtcaacctaacacgtctttggaaggatcgatgctcaggcttgtctcagctttgggctgggagaattccttgaggactgatgaggatggggcagaccacagtagcatttaaagagaaaaagggaaaagttaggttgtgcacatctgcataggcagactttctaattttgttacttcagtatatttgctgaatgtgcactgcaagaatatttaaagatcaaagttctatagcagtgagcccagaacatgctcaagcatggttaattctgccactttcaccctcttctccttcatcaccgatatggcagatacctagtggtggactcggtgcttctaaccatactgattatggaatgatcattacagactttgaataaggtaggcttctggaagaagataaaattacacttctattagaacgtcaagtaggaccttgcatgaaaagagccattgatccaaagggaagaaaggtaaagagaagaaaagaaaagaaaaacagcaacaacaaaaaacggagcccaccgactgtaatggagaggttgatgcttggctttaggagagcaggtcgtgtgtgtgttgaattacaggcaattatcagtggtctccctgttggccctgaagaatttagaactgcgtcaaaaggaaatctggtctatcaggagggaggtcctgctgcatcttttaaccctgtgccaactccactgcacttgaaactttccatgatgtatcctattcttaaaatctcacaaatgttgttggtaaaacaactgttagcatttgatgcgaggataaaactctctgctagatcacgtgttcttttaggggcccaaattgggattgtgaaaatgttatatgattttaaagactgaaataaatcctgcccgatgtcttctctgctttctagcagtttatccacaaggaaggaaccaacacttctgcacaaaccccaccgagtgagtgttgttcaccaatataatcttgaggcactacaagcccatgaagtttgggcggattctccaaagaataattacactccggtcaatgcaattttagtgttaattacacattattatattcctgggataagacacacttatatgagcatctcagccacctaagcatgcatcactgaaaaacggagatcaaggtggttcaaaggcttcatggagccaggcctgctagaggacaatgggcacttctcccatttatgcactgtgacctggactggtcagagttggccctgctcattcctcttgccagcccttaagggacaacagggacacaccatgcttctgatttagatggaatgaaggtgactgagtaaaaaatatggaaactaaatacttaaagggtgactctaattttttttcaggagggtttaaaattttgactaaccaaacatggagcttgggcctaatacttcaacatttttgtgctttagttttcttatatgtaaaagatgagcagatgaccatatgccacttgcaagcattaaggtcctatcagttgatgctgaagctgtgttagacaaatcacacgctggtataactaggctggatgaaagtctatcctgagtgttcacacagaactgcatagaaagttgatattggtaatgagggcctaggttagaactgttcagagaaagcacgacgtctgtgacagctgaatattgtgtggcaatattaagttgggttctgtttcatctctggctataaggcatacaaaaccatattgcatattttggtttcaaggtgtttttttttcctccctaaatttataccaatagcaaggcattattactccataagctccaaaaacattatttttaaaaacatatccaatatagatttggggtagtaacaacaactgctaggaatttaatccatcaattacactcctttttttaaaaaaaaatctggtcttctgccttaatgtttaaatatgcagaggttcaaagcacctgacaattaggtgctctgtgccttcttaccagacacttcacattaagacatgtcctttgttgacgagaatgtttttgcctggctgtctgttgcatttctctctctcttcctagcttctgtgatgctacttggtagagagtgatgtttaataatagtttgttaaatgaatcaacaggtaaacataaaatatggtcagtcacactaccgtgagtacacacacacgcacacacacacacacacacacacacactcattcacaaagtcctacacaggaaactaccccaggccattcccatttagaaaaaaatgtgcaactcgctgccagcactcatgtaattttacataaacacactcgttgaggctgaagaaaatctctctgattttcaatgtgaaaataaaatctaaaaactgtttttggagttatttccaaacagaactatcattagaatcatctgaaacatcagaatcatctattctggaaaaatcggattcatcaaatgcatctttagccaacaactgttcgagaatgatgtgaacatcacaggtaggaatgctatgttttctagaattcacattttcagtgactgagaattactatattttgtaagtgaagataccactaccaaaatcaaaatgctataaatagaatgatatcttttgtttccagagtcgatttgctagtaggttggtgcagaaataattccggtttttgccattaaaagtgatgtgaataacaatgaaagtgagatatttcatggcaaagttaactggggataaatggtgcacctgcaagcactgctggtgagtattcttgggacaaacagggaaagggttaagtagttcaggaatagtgaagatgcttcaccttctcaggccttttcctgatcccaagcccatgacacacatgacaattgatccaggcaactttcctaccgagactccttctcaagccccagctccggggcagtgagacagccactactaattcataagagttgtcacttgggataaagtaaaggttccatccctggaatagacatggctctttgctgtcaactcatatgttaatgtctggggatcaggtggatccctccgtgggttgaaacagaaaagaacttaaaacaacttggcattatccataggaaaccgaggagggtaagcaataaatctacattaataaaaaaatgccaggaggggtttcagcgccctccatggccactgcctgtggacaagagctctgctgactgtcaagtggaattgatcccatccatgtttcatcacttcaacagcgagtggaagcagaagagcatttatcatcatgaaacagacaagaattcttgctaattaccattttgttttaaagtatagtaagatttagggcaccctcgctaccccaactagcttctttccttgacttttatgtgggcagtgttgttataatttctctgttcaaataaagtctgtagaaagccacaaaaagagatctggaccctaaagcttaacggattctggaaagcagctggcttgtaacatgagtcattccagccaaagctttctcttttgtatgtttttctctgacctaaagagtgggttattggatgtcttctggcaggtgctacaggattaagaaggtagctggtcagaaacaaactttgaattagggggattttttaaaaaatagttgactaaagtaaatatgatcgttagcttaatcctccatatctaacgtgagattcaaatttaataggcaagtttaaaaatcggctggcatgtgcatctattatttgtgtatgtgtctggatgccttgctccaagagtacaggttagttgtccgtgatgaaatttccaagaccttcctgtttatcaggcccagcagtccaaaagcccaaatacccacatgacctccttttctaggattatgagagaaaaacaagtagaatattaataaattacagtgggaaattattcttttgttaaagtcacttttacaaagtttgtaggggattccagactatttctcacatctataattctgagccatgataaattaatagatttttgtataactctcagatatttctgaagatgcttcaggtttctgaatcattaaggcaagatcgacttgaatggtatccacttttagaggtggcgactctctcttaatgaacaaaatacttggattaataaaaattagtgacccacaggtttgacatctatatggacatatgacataggacatatgtccacatctatatggacatatgacaaaatctctgagcatgactttggacaataatttaaccttgaagagattcatttacacatctatacattgagatgaatgattacacttgctgtcacagcatggtaaagagaaaggaaagtgttctcggtgaaaaccctttagatactctaaagtagagtagaaatcaggcgtcagaaaacttttatggtaaaatgtcagacaataaatattttaggctttgtgcataaggtttttatcaaaactactcaactctgtcacagcaagaaagcagccatcgataatacataaatgaacgggcatgactgtattccaataaggcattatttacaaaatcaggctcaggccagatttggcccacggacttcagtttgctgagccctgatttaaacactagttcttgcgatgactgaacaacgtgaacgtccatgttatcgcatgtatacaaacatactatcccaatatgaatacacacatctacatcatttaccttctttaaaaatgtcctgccttttgtaagccattggtacctgtaagtaaataacattatattgggggtctatagatttagttgaattttcacccttgccttgcagcaaagaaaaaaagtctgaggcaacacatttgacagttggcccttgcatattataaaatctaatctaaatgagaccaacacataagcacctttatacatataaatctagtttataactgaatatcaactgagtttattcattatttgcttttcacagctctgcagacaggaagaaatggctaccagaataacagcaactctgagaagttattacgagaggtgaaggttattgcaaagttgagtttattaaagaccctcatccccaaattggagagaagttacaatgaaaaaaaataataaaacaaagtggagataatgtccagtgatgataagagtggaggcaaaatagccaccgtcatgcactgtggggtggaatataagttggcacagcctttccagaaagggcaatgtgtccgtaccaaaactcttaaaaatccttgtagcctttgaaacagatgtctatttctaggaacttatcctaaggcagtaatcagaaatgcacccaaagattatgttcagagatgttcattgcaacattattatactgaaacattagaaacaatctaaattatcaacaatttaaggccatttaagtaaactactgtgttatagaaattcatgcaaaaattaaggtgatattttagaagaatttttaatgaataaaatatattcattcataacattttaaaagagacaaaagtagtttacaaagcagcactttgagtatgatgccaaataaaaatacattttaacattatggaaaaaaggacatcaaatgataacaggagacctggaataattactaggattatgggtcatgttaacttctttaaacatgtctgatgttttaaggttgctccaatgaacttttgaaataagacaaaagtacacataattttaaaaattaatatcttagttatcttagttaaccagaatcagctgtactttaattaattggattttttaaggaaatggacaatttcagctggtatctaagggtccagttttcatgttgcgtgccatacataatcagtctaatatttcaatctcctgcagcaactgaattaaacaatgaaacatcctgcctaggtgtatagttgttcaggtgaggagtagtggcatagacacacttgattaggaatctggtgactttccttctagtccaggatcgatacttagtcatctctagccttgggcacatttcataacgcatgagtctcagtttccacatatacggaaaggagataaacatccgggctcagcttatctccaaagagttcctgggaaggtcaagcatgatatggctttctccttatcagtggttctgaaaacccagaaccataacatgttaagccaggggagccagtagaaaccactgccccatagtttttacaatgtgtgcttttggtaacagcaacccatgttagcaaatcggagcttcctccatgggcactgccagggcgtcctcagagctctgctttccagccacagacggggctgagccctctctgccgaggcagccgtttactcttgtgtgccatggagccctcagctccctgtaaacatccatcacagcactcactgctgcactattgcgacttctctgttcgtctcccttggcagcacatggtgatgctctgatcagagcctggtcttccctccctgggtttcccacaaggtctggatagcagagcatatgctgcacagcccacacagctgtcctggtaggaactgaggaaacaaggaagggagtgcactcaactcttgacagatttggagaagagggagagaaaacagctgatggagaagaggcagcaacgtggagtgaataagcgcggagatgctgaagtcaaactgcccaggttcattcaccagctctgccttttcctggctgtgagatcctgggcacgttcctaaatccctttgcatttcaacttccacacctgtgacgtggggatcataatcctacctaactcagagggttgctgtgagggttaaacttggtaatatatgggaagtgcttagaatagacaccacataataattaataattcttcttcttgttgttgctaggggaagccaaggcaggatatttaggtgttagctttcttccccttgtttttggtatgagaagctcttgagcatatttaggagacaagagaatgtttaccatgggataatgggtttggaaggatgaaggctgctttatcacagaaggtgctttatggtaaaagaaactcgtcctactcgccaataatgagatacaatgatgccagtggtggaagaggtggtggctgaggtgcgaacatcaaacacagccactcataacaagtactagaaaactcatctcaggctttgatcatgcgaaagtcaatggcctactaggcatacttagtgatcacataggaaggaggaagcaaaggagcatctgttgagtgcttactgtgttccaggccctggactagaagagaacttgacttgcatcatctcccactaacttcacaagaactctatggagtaagcgttgtccctgttttacagacaacaaaactgagattcagagaggtggacaggtcactcaaggtcaagagctagttaatgacagggcagagagttaagcctcagtctttatgactccagtgtacaagttgtcctgcaccacactctgcagcccagtagcaattacagaaattatcaaatgtgtattgggtgacctttgttgtgagtttcatttcattatgatagtatacttgatacatgttattttaggcttcagaactactcaagtagcctggtcacctaataacagctttggaaaacgctgaagagtccatcaatgggaaagagaccaaatggggatgctgggcataatggaaacaatgcttgttttgcagttttgcctaagacaggccttggatatggttagctatatttccactgctgtttctctgcaacccaacatgccattgtcttcagtgctctctgcttcccttgcgcgtggggtgtgactgcaaggtgaagtggctgatctagaacaaaggttgcaggacatacacagcttcttgtagacagcttctctcctaaagagcactggtgagtcagttgtttggggcttgagtaaagctttctattaaaataaagttacagtgggaataaggcttatggaatagcccaggcccattggagtttgttttgcccaccatacgccagctgcagaagtaattggagatctgggtcctaagatgagggactgcatattggaggaggaagaagcagcatcctctccctttcttaaactcaggcaaattataaaataggtacagttcaattccctcatcctgctccttcttctgcctgaggggacagaacagccttaatctgtcctgacccatggtccaggggctagtgtagtcatttgataccccatttctggggcctgaagggtccaggtataaagggaccaagacaggaatgctggggacctcttagcacttgccccaggcccccttccatccagggctgtttcatgtccttcccatccaagaggctctacattagcctactgaagagcctgttgtatcagaatccgtagaatctctgggacttgcagtgtgtgcacattgtgtgtgtgtgtgtgtgtgtgtagctgatacagagtagccaaggcctaggggtgggtggcaggcagagaagctcataaagtgcagagtaagggcccaaagagcagtaatgggaagggggtgagggtttaaatggaaaagaggcaaaaatgggagggggtgggaaggagtgggtggagctggcctccctcagaatcaagctgggctcacttgtgatttaggaggtatgaagtggggaatcagtctttgtctaccttctgttccctgcacccagacctcctccactttcttagggtaagaaatgcctttgataggggtaaagcctttctttccagagtttgagatcagagacttcaatatgcaaagtcttggggtatgctgacagatcagcacacgtgctttttatatttaaataattctcacaacctatgtggcttgtcaggaatgaagaatctaaagcttattgtgctaggggagctccgagtgaacaaagggtgccgaaaggagagtggggggacaattgcatcatcaatttgcagatgtcagaatgtcacattttggttagggatcaggctcattttacacacgcctaagcaactggaaaacatgagagagtattggggccagttgtgataggggccaaggagactgaaatgaggacacctgaggtctacttttcaggctatctggtgtgactttggataagttatttcacctccgtgggccagaaggtgctgatctatcaaatgagcagggaacgtgggaactctaagtttgccctgctatgaatcactctgggtctatgttttgggggactgagcactggggagtctgtgttagccatctttcttctcatagttctgtgttctccagtgggcttttatcatagccgtcttcaggaaaggagctgcagggcattcacccgggtgcaaaggaccagcagtccttccagagaaagaagtaaagtctttagctaaagaacaaagatttaacggtggaactgtccacttgaattggaagggctggtagctttgggtccagcaagggcaccccagatattaaatcaatgaataatatggagagtatagtatattgttactggctgaattgtgcccataccccaaaatttatatttcctgtttttgtttgtttgtttgttttttgagatggagtctcactctgttacccaggctggagtgcactggtgcaatcttggctcacgtcaacctccacctccctggttcacgccattctcctgcctcagcctctggagtagctgggactacaggcacatgccaccatgtccagataatttttgcatttttagtatttttagggtttcatcatgttggccagactggtctcaaactcctcacctcaagtgatctgcctgtctcggcctcccaaagtgctgggattataggcataagtcactgcgcctggccccaaattcatatttccaaggcccagcccctagtatctcaaaaggtgaacctggaacagatccttccctcatggctgtcagaaggaaccaaccctgccaacactttgatcccagacttccagtctccagaattgggagaaaataaatttctgttgcttgagtcctccagtcggtggtactttgcagcctgagcggacgaatgcatatatcttacaaacctttcataagaaatctttcctctgtaggcccaagtaatttgatttcttagtgtgatctgatatcgtttgaattatcacttaacttgggggaattaaataaggcactctggacatacgcagcccctcaggaacacagcttggtgagtggatgatccttttgtttgaaaaaggtgccccttcctctacgcagtcacacctcaccctgggacccttgatttggcaagcagagccaaggctggatttcacctcccacagtccccctcagtggggtgcctttgtacagtgtccaacctgcccaacgatctgcagtgaacctgcatgagatcaggaacccctcaggaatagggattatcttaatctttttggaggcctaagacttagcttggggctgactctccaagcaccctcagccaacgttagttgttcgaacaaaggcagcttggttttctttgggggttgaagggaaacagggaataatttcaccacactttcagctcaaaagtctccataggtctctactgccttcaggaggaagtcttaccatctggcttagattggcctgggctaacctgaactggtcaaccatcccatcattaccttctaacactgcatccccttcatttgaagtgatccactcatcgtcctcaaccacacctggcacttcctgccttgcaggtgctgctttcttctcctggatacctttccctgttctcctttaacagcaaaatcctaagttgacctgagtcctctgtaatggctcgagacaccttctagccttccagtcgtctgaatggctatggtattactgcatgccctgcttagtcctgtgcagtttaagattctccccacctattccacaggtatatgtcttctgtcctcaaactgctgggagacaaagatacatagctttcttttatgtctgtaagaggcctggcataatactgccagtgcactgagcaagttagcaacaacctcatagaaaatgctaatgctgaaaaaattaaaataattcaatgattatctatattcggacaaagcattctggaatcacagcaagaaaatgtggcaaacctccttgagcccttgagcctctgcacctcacacaggatcacacccacaccccccagaaagctgaataagacctatgcaaacaaccttccagggaagggatcgacaaccacaatcagccttctgcctagttaatcataaacccaaacctgccgaagccaagtccatcgccagaacaaggggacaattagcattgccctttgcacacagctactcactgggaaaatcgtgcactgatcagtgcacgcggcttcaactttctcctgaccccagaagattctagcgaagggctgcttggttatagaaatagaaagcccttatcaggaagctgtcaatttcatgacaaacttggtatcggggaagcagataatgggctgtttacatagtcttaggcggaccaggattcatcttgggtcttagggtttcccaattccagatatttcaaatatggaaaacagcaaaacaagtcaaaatgatttaatactgtatatatagcaataaaaaaactgaaaaagtattattttctaaatctttaagagttgcaattagattttttttttaaccaaaatagcacaactgttccccttctctatagaaagttttcattagttcctccccgaccttactttccagaggacctggtaataaacaaaagaatgatcccttgagcatttttcatcatagcatcatgcttttaatggagcagagatgaatcctgggctgctgtgacccacgggtagaaaacacagtgcttctgtgtttgggtttgatcaccctcatggagaaagtggctcctgaagacagatgtaattagttctaatgtctgaggcctttggggatgttcctaaggctttttattgagaaggcaaagcaagcagaggtgagatctgggaggataaagtagaaggcaatgagacccgaaagagtttggcttatgcaaaggaatttccatgagcacccacaaacattggtccaggtactctcttagtcactgtcccctcgaggatggggaagaggaagctgccaacgtcacctggctgctgcatcgacttcctcctcttgccccatcatccatctcagttttagatttaagccaggactgattctctgtggtctaggctgatgtgcaagtgagaatcttgattagaaaacccccaaataactaaataaatgaagtctgttgcttgtttaatgcctttaaatagtgtctcatttataaaatgtatttacaacctttaaaagtacactttgcttctatggggacttatggaacgttctgacctaagtccttgtcagtagctttgagaaggggaatgaggtccccacaaagaatctggggcttcccatcatctccacttaccttcaggctggctggctgaggcacttgggtaatgactttggggagacaataacatgtttagctttagtcttttctcaagagaaaattccatcttggcagtgtccaccagggatactctgtccctaggttttggagtatgctcattccccatgactggcaaagtaaaattgaaccatggagccagaaagtctgagtcagtctgagtcaggccctgtaaccctgcacaccaatctgtttctcagtttcccatccgcaaaatggggtgaatagctgtatctactatgtaaagattgttctgaggattacatgagttattatctgcaaagcacctagaacaattcctggcacatagcgagcgagcactgtctaagtgtttatgaactaactaaataaatggtcttaactttctaggtgctgatttttttctctatcagggaaaatgtttctgtgtgctatttgtggaataagcaataatgatagaagctccaaacatagtcacttaaatacactatgagcactatgcgtgtgcacatacacataatatataaatacactgagctaaacattactatcttccccatgtcaagctctgaagcaactgagaaataaacccctgaaatcaaatgaagaagtaaataccagcattttgcttgtagagttgagttggagaaagagcccatctggggtttcttccagagcatgagaagtacctgcagggacctacccagccagccacaggggcctgcgctgacctcatctctgctgagccctgagatcaggacatagctggggtgggagcgggccctgcctcaggcctcatccagggagacagaggcagaggagaatgcaccatatcaggcaggctgtccccagaaggcctctctcaatctctcccattggatgtgcctctcctctcataaggcggaagaaggcagaggcagatagaagctcagagctcttctctcaatgcttccaaaagggtaggagttcccatttaagaggctggcaagaactccaggagcaggcgagaatgatccccaagacacatatcaatgtgaaatacatgtgtttatattgtgaaacagtcaactccagcttcagaagcagtttgctggggatcattgtcccctccagactgaacacgggctaacatgtagctgagagcgggtgtagacaatagtcttgaaggagctgattggcggttccgtggtttaccagcagcaccgggcaaaggaatgtggcttacctttgaacagacgaaagagggtggaagcgtctgcaccaggtgtgtgcaggcaagggcatgttgagagataggctgggtggtaaagagaggttccttctcggtcttactcttgatggagtccgctggttttctagcctgcgccccgcaggagtgcctgaagggtgtctggtatcagtaatctcctatccctaaaccagcaggagctggggaacatttaacaaccagctcttcaggataaacagctttgacttataacatgtgcagatttcagcaatcactgctgatcactatagttcctctcacagcaacactctatgttagagcatttccaccatttagagataagaaacaagtgcatatagatctttgtaaactgcaataaaataataaggcagaggctgggcgctgtagctcaggcctgtaatcccagcactttgggaggctgaggcgggcggatcatctgaggtcaggaattcgagaccagcccagccaacatggtgagatcccatctctactaaaagtacaaaagctagtggggtgtggtggcgggtgcccgtaatcccggctactcaggaagctgaggcaggagaattgcttgaacccaggaggtggaggttgcagtgagccgagatcgcgccagtgcactccagtctgggcaacatgaatgatactctgtttgaataataataataataataataataaggcggagattattttttagtgattttgacctttttttttttgagacaaggtcttgctctgttgcccaggctggagtacagtagcatgattacggctcactgcagcctcagtctccagggccagtgatctttcagcctcagcctcttcagtagctaggactacaggtgtatgccaccattcctggaaaatttttgtacttttttgtagagacagggttttgccatgttgcccagtctggtctcaaactcctgggctcaagtgaccagcccaccttggcctcccaaagtgctgggattacaggtgtgagccaccacacctggcctttgtttaactcttaagtttgcataatttaattttgcatgatgtctttgtttaactgccagcctgcaaaactccggaaaattaacaatcaagtcttgtgagatgatgcaaacagaaactactcgaagcccatatgtcattgctgtaggaaaagcaggcagattttcacctgcaagcatttcccttctcctctgtcactctctccctgtcccaggtgggtgggtggatcagactgaggctgcagctcatggcagggggctggactgtggatgactgtctcctccctagccgggaggccagaggcactcaggtggttcaagttgacctgcggggctagcagggcagagtagggcttccctgcactttggtctccagccctgcctcattgaggccaatggtttgctttctctcctggctagtctccagctgtgaatgcatctggataaagacaggactggagcctgagggtgggaaatgaaaggggggcacaggaatccagtcaacattgcctgatttacaggagtgacggctcacaagtgggtacacaattgaggatgggtggaagtgagaataaggagagcatctgtgggtaccagttttatggtgtcacagacttcttttgtaaaaataataaacacataaattaaatattaggtgaaatatattttattatatatgtgtgtattaaattattatatattttactatatttatatagtttacatatatactatatactaattataaatatatatcaacatattaaataaatacaaatcaataaacaaataaatatttagcctggcacatatctgcacagcaaaagactgtatttcccagcctactttacagctaggtgcctccatatgtttgtttacgttctggtcaatgatttgtcagcaggagtgtctgggcaaatttcagatcctgctcttcaagggaaagagtagatcttccccttccatattctctcttgctgctggctggaatgtggatgtgatgttgggggctggagcacccattttgagccatgaggtaaatgccaggcattgcagaaggcagcccatcagggtagcagaaacctggttctttgtgattgtgaagatgccatgccaatctactgagacttctacaagagagagaaacacacttctatcttgtttaagccctgataatttggaatctctctctcatagcaacctaaccaataccctaatacaacacaatgtctttatgtgtgtgctattagtaatcagagcatgtctgtggtaaaagtagacctctgggcattcttcaaaagacttagaactgacttttaactcactttctgcatcccatccttttaacttctcagaaagtgaggatcagttatatagttaggttcctgccctgaaagtactacagtatgacagcaccaggcttttattttctttttaactaggtgtgactaatttggagattactttttaaacatacacctaagatgttgtagctaatactgcctcttccatcctagtcactttgcaacttgacattcttttctagtgatgatgaaattctcagcatccagttagaattcatacaatggtgcatatgctttagaatagcctcaatgtctggaatataagtgatgggtctgatttttagaaacagccagaaggcatttaagatcaagactggtgacaaataaggtgaccaaggaagcttgacaatacctgtcttgttcaaaaatgaggtgtgatttaaaagtaaggaggatttacttgtttagccaataaactaactctgaaagtcatttcaaaaaagcagatccgaagatgtttaaagtaataatggtgctgttagaatggtgctccctctccctcccaggggatgactttgaaggacactacaataacagatgtgtaaattctgaaatatatggctaaaatgaggtttattattttctagtcaccacttagacatcttttagtcatttgtttatgacagtttataaatgagaaagaagtccatttaaaatatctccatgaggacctcaaggtaaataataggaatcgatcattcatcaatctggcctggccccggcccactgaagaaagttccttcttgagtgcattcaaagctctcatggtccagccctgttcaacctgagcagcatcctatctgctcctcccccagacgttccgatgccctgcaccagattcaagagagagccaagttccccaacaggctatgcacgtggctattaacacccagcacacgctatccctggccagctctctccttcttccctaagaattaaacattctttggcctgagttttcctcctttatgtcaccataaagttgagttattcattattagggtctatacatgagtagccaaaatatacgggtctctatatttaggtcaaggggccttcagcaggagaacatgaataattaggagtgaggccatgagacagaggaagaaaagctcataggaatgggaagacagcctctcagatgagaggtgtgcggagtgattgctgtgaggaattgctcaataggaaagttagccaacctgaggacgtttctaggggaggaaaagggaaactcatatggttctctgctaattcttaaaaataaggtagattcttactcatctagggtgcttgctcgttatgaacacaggaagattaaggaatgagtatggactgtttctactctatgttttcggacaagaagaataataaaaaagcactgggtagctggaacaactgcagaggccccaacaatgatggagactttctggtgcaccgtggcacaggggtctcttccaaagggactcaatcaaccccaacaggcatcatcttctgtgactcaagatgtcctttttaggagtgcttgtactttttaatgctcagagaagttcgtattactgattcgggaacactgagtttttcagctcctgtaaaactattttcaggtttattttcaagtacattctttacctcggggggtcaaatcttttggtttccagtgaatatcgtggttatacctgtggttacccactgacttctcatctgcctagcttatctgataacaggcaaatggggaaagaggctttaatacccctcaaaaggggaagattgataattagttattcaccgcatagaatcaggccaggtcaactctctccaagaagaaaagcaatctggatattgcactttggggtcccttttcattttggcattacaggcctcatgaggatgtagtctttctgtatttctttctttctttttaaattgttatttatttatttattttaaccaggtcaaagcattacatactgcagaagagaaagcaacttcagcttctcttaaacggtgtcattttcatgacagctcgtaaattttggcctcctatgggtccaggatctgcgcgcatccgcccggggacttgttggtggatccatccctcatggcggagcagcaaggggatcctttagaaaaagcaatgggcgaagtaactgaaagagcgacgcagaaagcaacagccagaaacggcggggacgcgagcggcccagacaggaagggaggcggtggcgcagctctggtgcgcagcgcgccgcagcgacggaacttctgcaaaagctgcctgcccgcgcgttatcagcggcgcgcaggcctgtggttttctcgctctcgcaaccctgctttaactgccggtttatttttcgacaaacaggatgcctccatctgaggctgtcagcatcccaggctctttgaaagaaaagaagtagagcggccccaccctagaggcaaggacggggtctgtgtcaagaggcttcccagagaagtgaaaactctgcaggtgcagccgctgggagagcatcaagaagggcagggtggaggggcagggggcgaagggagggggtgaagcccgcaccctacccccacatgaaactgattccactaccccatctctgcaagcgtccagaggcagagaggccaacatttcggggacagcttggaggcgggagatttaggcagggctccttaaacttttatgtgcatgaaaatcaggccaatcacggggctcttgagcaaatggggacgatgattcagcaggtctgggctgaggcctcagattctgcacttctaacaagttcccaggtggtagtgatgctgccagtccaaagaccacactgtgaatagcaaggcgtcgtcgggacagtctgctttagagtaaaacctaatagatgtgcaaatatttaaaccaagctgtatttattcctgaggccctggtttaactggagccaccttgctaatggaaaatggaaaatgaaattcctttaggttccaaagggaaggaaagtttgaaatggttaaggtatttaaaaaatcctagttgggagtggccttggggattcgggagagttgaagttaggttctgagccaagagatgggggaggaagggtgggatgtggcaaataaatataaacacacacacacaaaccccagcccaaccacaggttctttcctatcaatgaaacatttgcatcttgcaggtagaactcacacgtgtccacatttttcagaagttgaatggttttgtgtaatggtacagaatttggagcccatatttgaatattctagatccaatgttatctcagactggctttaggatcttgtggcctacatttaaaaatgcatgtttctgagtcatgtttaattagtagtagtatctgagaactgagagactagactaagaaatccatggtatatgaataaaatctccagacagcagctagaacatagaggtccctccagaggcagtgccagttgtcagctgtaaaaataggttctgctcagttttgcttaggcctgaagtttcctgaagatttcatttagacttcatcaaaaccagtcaaagacttcctgttacagaaaggttcttaaagtatggctgggactacagggctattaagatgcagattcttgggcctctctgcctcactcatcatggtttctcagggtgggtgccgggaacctgcattttaacaaacgctttgaggattcttatgtactgccaagtttaggagtccctggtctgcaggtttaagttcaaccttctcactgcagcattcaaagacctggcttcaattttgctgttcacaggcgagcctcagtgacttcctcactgccctctgagcactcctggagccacctggctgcctcattcatttcttctcctctgtctttccccagccctggaataaaatgacttccatcttcctctccgaactctcttcagatcatggcttcccactcagcaagcagttactttcctggtctgccactgctgtggtattaatgataggccactcgattctcattttgttgactgaatatttctcatgcttaggctttgcctccctgaccagacagtaagttctctgaagccatttcatgctatataatctttatgttcaagactactttctaacgcagtgtcatgtccacatggatcattcagtaaatttaccgatggcttatctatcaccaacatgttttacagagtgttattaagcagggacactctctatgggtctaggatcagaagaagctgggaagagaaatggggtagtggtgagagtgtcatgagaatctggttatacagtcatcaaagacacagaggaagtgggaaaaagggagtgtagacccctagctcatctgtctgcagtgtgaattggagaggggttcctttttgtttaatatagttaattttccacttgaaatcaaggtcaccaaacctatgagccaaacgatggatgcttgcccttcacactcactgcctagtgatggagctcttggtggcctctctccaccatctctgctccaccatctcttccactctggctggcttcccttcttcctttctgcctgatgggttgtcaactcaaatgcccaactccaagctcaagttaaaggaaatttcaagtgtattacatataatgaagcagactgaaagaacagtagtatactagtaagttagcttaacatggtttagtggaaagcagccaatacacctcagttctgatcctaacacagctagcatcattggccgtgtcaccttggttttcttctttagcctttctgagcttcaaaatttttgttatctaaactctgagcctcagtgttttcattaacagagccagcataacaatgttggcttctaaggcattgggcaggtgagtggggtagttatggagaccacctgagagagcctggaacacggttggtgctggcaacctacagggccccagcccttggcgaggtatctttctggagaaatgcttcctagtgttcctagccattccttgcctcaggcaccttcactaccatcccaatcacaggcctactgctcttcctggtccagcttgctggtcctagtgcttagcttctctcttaaggggatcttttgacctctgtaggaatttcttccgtcttgggcttctggcatggttctattggtcacctggcaccctcctcaccacttcagtggtgcccccaactctgcttctaggactctggcaagtcctacaaccacgatcctggtaatagtacgaggttggatttgtcaaccttgtcacgatcacatttctgttctgcgcattgtgggctgtttggtagcatctttggcatctgcctactggatgttagtacagtcccctctatcccttgagttgtgacaactagaaatgtctccagacagtgccaaatgacccccttcctcctcacactgcctccttcttccaggtaaaaaccactggtgaggccgggtgcggtggctcacgcctgtaatccaagcactttgggaggccaaggcgggtggatcacgaggttaggagatcgagactatcctggctaacacggtgaaaccatgtctctactaaaaatacaaaaaattagccgggcatggcggtgtgcacctgtaatcccagccactcaggaggctgaggcaggaggatggcgtgaacctgggaggcagagcttgcagtgagtcgagatcgtgccactgcactccagcctgagtgacagagtgagactctgtctcaaaaaaaaataaaaaataaaaaaaccactggtgtaagatattttaaggtgacaagcatggagaagaagagaaaagtaatgaggaaaaactaaactggcaagatcaataaatatggtctaaataaatgaaaaaggagattgactaaatagacccatgggaaatgaaaccaggagataaaatgttaaagaaaagtataaaaattgcaaagataagagggcattagatcggctcaaaatggattaaagacttaaacctaaaacctgaaactataaaactactggaagaaaacacaggggagaggcttcttgccattggtctgggcaaagatttttttgaatatgatctcaaagcatacgcaacaaaagcaacagtagacaactaggatggcttcaaaataaaaagcttttgcacagaaaaggaaacattcaacagaataaagacaaaacctacagaaagggaaagaatactggcaaatcatagcatttgataaggtattaatttccaaactacataaagaactcaaacaactcaatagcaaggaaataaataatgtgatttaaaaactgggcaaaggacctgaaaaaaacatttctcagaaaaaggtacacacatgtccagtaagtataaaaaatactcaacatcactcctcatcatgcaaattaaaaccacagtgagctatcacctcacacctggtaggaaagcttttatcaaaaagttaagagatggccgggtgcggtggctcacgcctgtaatcccagcactttgggtggccatggcaggcagatcacctgaggtcaggagttcgagaccagcctgaccaacatggagagaccctgtctctactaaaaatacaaaattagctgggcatggtggcgcacacctgtaatcccagctactcgggaggctgaggcaagagaattgcttgaacctaagaggcagacgttgcggtgagccgagatcgtgccactgcactccagcctgggcaacaagaacgaaactccgtctcaaaaaaatagaaaaatcaagagataacaagtattggtgaggttgtggagaaagggagctcttgcacactcttggtgggaagccattatggaaaactgtatggaggttccccccaaaattaaaaatagactaccctatgatccagaaatcttatttcttgattttttggtatatatccaaaggaaatgaagtcagtatgtcgaagagatatctgcactgtcatgttcatagtggtactattcataataaccaagataaagaatcagcctaagtgtccatcgacagatgaatgaataaagaaactgtgatgaatatatacacaatggagtactattaagccttaaaaaagatagaaaccctgtcatttgcagcaacatggatgaacttggagtacattacactaaataaaataaggcaggcatagaagaacaaacactgcatcatcttatgtatatgtggaatcctaaaaagttaaatctaaaaagactgtacattaaaggtacctaccattgttatctgtctatggaaatattttttaaaaagaagttatttattttggtggaggatccactaaggaacattcctgaatggaacaaagaatgaacctcaacacagatggaatctgtcttagatgtggatgtggctatgggcacagatgggtgcttctaagtgactgcaggccaagcctggctgagaagcatttgggtacagaggggcttttggggaatgatcaggggtgatcaggagcaccagctcctacagattgtttgacacatgccacaagccttgaaatggaaaaggaacacacatatgtcatatcacctctcaacatttcactgaaggagattttcccctaaatagaaagatatggagaaagagtactgagaataatgggctggataagtgggacaatccttgcccttactgaccttcctgaagtgtcgctgaaataggtggacttagaactgaatggaatctactctaagttatttagcaaacctcttctgttatcccactagttaccttttttgaagaggaaaaataagagttgagtttttccattaagaaagtctatttaagctgataaagtggaaaagagggcatcctttctgttctttgattgatgtcctgtaaataacccaatggg
